(19) United States
(12) Patent Application Publication
(10) Pub. No.: US 2011/0039762 A1
(43) Pub. Date: Feb. 17, 2011

(54) TARGETED ANTIMICROBIAL MOIETIES

(75) Inventors: RANDAL H. ECKERT, Redondo Beach, CA (US); CHRIS KAPLAN, Los Angeles, CA (US); JIAN HE, Los Angeles, CA (US); DANIEL K. YARBROUGH, Los Angeles, CA (US); MAXWELL ANDERSON, Sequim, WA (US); JEE-HYUN SIM, Garden Grove, CA (US)

Correspondence Address: Weaver Austin Villeneuve & Sampson LLP, P.O. BOX 70250, OAKLAND, CA, 94612-0250, US

(73) Assignee: C3 JIAN, INC., Inglewood, CA (US)

(21) Appl. No.: 12/683,327

(22) Filed: Jan. 6, 2010

Related U.S. Application Data
(60) Provisional application No. 61/142,830, filed on Jan. 6, 2009.
(60) Provisional application No. 61/151,445, filed on Feb. 10, 2009.
(60) Provisional application No. 61/243,905, filed on Sep. 18, 2009.
(60) Provisional application No. 61/243,930, filed on Sep. 18, 2009.

(51) Int. Cl. A61K 38/00; C07K 2/00; C07K 14/00; C12Q 1/04; A61P 31/00; A01P 1/00

(52) U.S. Cl. 514/2.4; 530/300; 530/350; 514/1.1; 514/2.3; 514/3.3; 514/3.5; 435/34; 514/3.7; 514/4.4

(57) ABSTRACT

This invention provides novel targeted antimicrobial compositions. In various embodiments chimeric moieties are provided comprising an antimicrobial peptide attached to a peptide targeting moiety that binds a bacterial strain or species.

### CROSS-REFERENCE TO RELATED APPLICATIONS

[0001] This application claims benefit of and priority to U.S. Ser. No. 61/142,830, filed Jan. 6, 2009, U.S. Ser. No. 61/151,445, filed Feb. 10, 2009, U.S. Ser. No. 61/243,905, filed Sep. 18, 2009, and U.S. Ser. No. 61/243,930, filed Sept. 18, 2009, all of which are incorporated herein by reference in their entirety for all purposes.

### STATEMENT OF GOVERNMENTAL SUPPORT

[0002] [Not Applicable]

### FIELD OF THE INVENTION

[0003] The present invention relates to novel targeting peptides, novel antimicrobial peptides, chimeric moieties comprising novel targeting and/or novel antimicrobial peptides and uses thereof.

### BACKGROUND OF THE INVENTION

[0004] Antibiotic research at the industrial level was originally focused on the identification of refined variants of already existing drugs. This resulted example, in the development of antibiotics such as newer penicillins, cephalosporins, macrolides, and fluoroquinolones.

[0005] However, resistance to old and newer antibiotics among bacterial pathogens is evolving rapidly, as exemplified by extended beta-lactamase (ESBL) and quinolone resistant gram-negatives, multi-resistant gonococci, methicillin resistant Staphylococcus aureus (MRSA), vancomycin resistant enterococci (VRE), penicillin non-susceptible pneumococci (PNSP) and macrolide resistant pneumococci and streptococci (see, e.g., Panlilo et al. (1992) Infect Control Hosp Epidemio., 13: 582-586; Morris et al. (1995) Ann Intern Me., d 123: 250-259, and the like). An overuse, or improper use, of antibiotics is believed to be of great importance for triggering and spread of drug resistant bacteria. Microbes have, in many cases, adapted and are resistant to antibiotics due to constant exposure and improper use of the drugs.

[0006] Drug resistant pathogens represent a major economic burden for health-care systems. For example, postoperative and other nosocomial infections will prolong the need for hospital care and increase antibiotic drug expenses. It is estimated that the annual cost of treating drug resistant infections in the United States is approximately $5 billion.

### SUMMARY OF THE INVENTION

[0007] In certain embodiments, novel targeting moieties (e.g., peptides) that specifically/preferentially bind to microorganisms (e.g., certain bacteria, yeasts, fungi, molds, viruses, algae, protozoa, and the like) are provided. The targeting moieties can be attached to effectors (e.g., detectable labels, drugs, antimicrobial peptides, etc.) to form chimeric constructs for specifically/preferentially delivering the effector to and/or into the target organism. In certain embodiments novel antimicrobial peptides that can be used to inhibit (e.g., kill and/or inhibit growth and/or proliferation) of certain microorganisms (e.g., certain bacteria, yeasts, fungi, molds, viruses, algae, protozoa, and the like) are provided.

[0008] Accordingly, in certain embodiments, a chimeric construct (chimeric moiety) is provided comprising: an effector attached to a peptide targeting moiety comprising an amino acid sequence found in Table 3 and/or Table 12; and/or an antimicrobial peptide comprising an amino acid sequence found in Table 4 and/or Table 5 attached to a targeting moiety. In certain embodiments the targeting moiety is a peptide comprising an amino acid sequence of a peptide found one or more of Table 3 and Table 12. In certain embodiments the targeting moiety is a peptide comprising two or more amino acid sequences of a peptide found one or more of Table 3 and Table 12. In certain embodiments the targeting moiety is a peptide whose amino acid sequence consists of the amino acid sequence of a peptide found in Table 3.

[0009] In various embodiments the effector comprises a moiety selected from the group consisting of an antimicrobial peptide, an antibiotic, a ligand, a lipid or liposome, a agent that physically disrupts the extracellular matrix within a community of microorganisms, and a polymeric particle. In certain embodiments the effector comprises an antimicrobial peptide comprising an amino acid sequence found in one or more of Tables 4, 5, 14, and Table 15. In certain embodiments the effector comprises an antimicrobial peptide comprising an amino acid sequence found in one or more of Tables 4, and 5. In certain embodiments the effector comprises an antimicrobial peptide comprising an amino acid sequence characterized by a motif selected from the group consisting of KIF, FIK, KIH, HIK, and KIV (e.g., as identified in Table 7). In certain embodiments the construct comprises a targeting peptide comprising an amino acid sequence found in Table 3 attached to an antimicrobial peptide comprising an amino acid sequence found in Table 4 and/or Table 5. In certain embodiments the construct comprises an antimicrobial peptide comprising an amino acid sequence found in Table 4 attached to a targeting moiety comprising an amino acid sequence found in Table 3 and/or Table 10, and/or Table 12. In certain embodiments the construct comprises a targeting peptide comprising an amino acid sequence found in Table 3 attached to an antimicrobial peptide comprising an amino acid sequence found in Table 4.

[0010] In various embodiments the targeting moiety is chemically conjugated to the effector (directly or via a linker). In certain embodiments the liker comprises a polyethylene glycol (PEG). In certain embodiments the targeting moiety is chemically conjugated to the effector via a non-peptide linker found in Table 16. In certain embodiments the targeting moiety is linked to the effector via a peptide linkage. In certain embodiments the effector comprises an antimicrobial peptide and the construct is a fusion protein. In certain embodiments the targeting moiety is attached to the effector by a peptide linker comprising or consisting of an amino acid sequence found in Table 16. In certain embodiments any of the constructs and/or peptides described herein bears one or more protecting groups. In certain embodiments the one or more protecting groups are independently selected from the group consisting of acetyl, amide, 3 to 20 carbon alkyl groups, fmoc, tboc, 9-fluoreneacetyl group, 1-fluorenecarboxylic group, 9-florenecarboxylic group, 9-fluorenone-1-carboxylic group, benzyloxycarbonyl, xanthyl (Xan), trityl (Trt), 4-methyltrityl (Mtt), 4-methoxytrityl (Mmt), 4-methoxy-2,3,6-trimethyl-benzenesulphonyl (Mtr), mesitylene-2-sulphonyl (Mts), 4,4-dimethoxybenzhydryl (Mbh), tosyl (Tos), 2,2,5,7,8-pentamethyl chroman-6-sulphonyl (Pmc), 4-methylbenzyl (MeBzl), 4-methoxybenzyl (MeOBzl), benzyloxy (BzlO), benzyl (Bzl), benzoyl (Bz), 3-nitro-2-pyridinesulphenyl (Npys), 1-(4,4-dimentyl-2,6-diaxocyclohexylidene)ethyl (Dde), 2,6-dichlorobenzyl (2,6-DiCl-Bzl), 2-chlorobenzyloxycarbonyl (2-Cl-Z), 2-bromobenzyloxycarbonyl (2-Br-Z), benzyloxymethyl (Bom), t-butoxycarbonyl (Boc), cyclohexyloxy (cHxO), t-butoxymethyl (Bum), t-butoxy (tBuO), t-Butyl (tBu), and trifluoroacetyl (TFA). In certain embodiments the peptide and/or construct comprises a protecting group at a carboxyl and/or amino terminus. In certain embodiments the carboxyl terminus is amidated and/or the amino terminus is acetylated. In various embodiments the chimeric construct and/or peptide is functionalized with a polymer (e.g., comprises polyethylene glycol, cellulose, modified cellulose, dextrin, etc.) to increase serum halflife.

[0011] In certain embodiments pharmaceutical compositions are provided. In various embodiments the pharmaceutical compositions comprise a chimeric construct as described herein (e.g., a chimeric construct according to any of claims 1-26) and/or an antimicrobial peptide as described herein, in a pharmaceutically acceptable carrier. In certain embodiments the composition is formulated as a unit dosage formulation. In certain embodiments the composition is formulated for administration by a modality selected from the group consisting of intraperitoneal administration, topical administration, oral administration, inhalation administration, transdermal administration, subdermal depot administration, systemic IV application, ocular administration, and rectal administration.

[0012] In certain embodiments isolated antimicrobial peptides are provided. In various embodiments the peptides comprise one or more sequences selected from the amino acid sequences listed in Table 4 and/or Table 5 (and/or the retro, inverso, retroinverso, or beta forms). In various embodiments the antimicrobial peptide bears one or more protecting groups e.g., as described herein.

[0013] In certain embodiments a composition effective to kill or to inhibit the growth and/or of a microorganism and/or the formation and/or maintenance of a biofilm is provided. The composition typically comprises one or more isolated antimicrobial peptides, the amino acid sequences of the peptides comprising one or more sequences selected from the amino acid sequences listed in Table 4 and/or Table 5 (and/or their retro, inverso, or retroinverso forms). In certain embodiments the composition is effective to kill or inhibit the growth and/or proliferation of a yeast or fungus, and the composition comprises one or more peptides, the amino acid sequences of the peptides comprising one or more sequences selected from the group of amino acid sequences listed in Table 4 and/or Table 5 identified (e.g., in those tables) as effective to effective to kill or inhibit the growth and/or proliferation of a yeast or fungus. In certain embodiments the composition is effective to kill or inhibit the growth and/or proliferation of Aspergillus niger and the composition comprises one or more peptides, the amino acid sequences of the peptides comprising one or more sequences selected from the group of amino acid sequences listed in Table 4 and/or Table 5 identified as effective to effective to kill or inhibit the growth and/or proliferation of Aspergillus niger. In certain embodiments the composition is effective to kill or inhibit the growth and/or proliferation of C. albicans and the composition comprises one or more peptides, the amino acid sequences of the peptides comprising one or more sequences selected from the group of amino acid sequences listed in Table 4 and/or Table 5 identified as effective to effective to kill or inhibit the growth and/or proliferation of C. albicans. In certain embodiments the composition is effective to kill or inhibit the growth and/or proliferation of T. rubrum and the composition comprises one or more peptides, the amino acid sequences of the peptides comprising one or more sequences selected from the group of amino acid sequences listed in Table 4 and/or Table 5 identified as effective to effective to kill or inhibit the growth and/or proliferation of T. rubrum. In certain embodiments the composition is effective to kill or inhibit the growth and/or proliferation of a bacterium, and the composition comprises one or more peptides, the amino acid sequences of the peptides comprising one or more sequences selected from the group of amino acid sequences listed in Table 4 and/or Table 5 identified as effective to effective to kill or inhibit the growth and/or proliferation of a bacterium. In certain embodiments the composition is effective to kill or inhibit the growth and/or proliferation of a gram positive bacterium, and the composition comprises one or more peptides, the amino acid sequences of the peptides comprising one or more sequences selected from the group of amino acid sequences listed in Table 4 and/or Table 5 identified as effective to effective to kill or inhibit the growth and/or proliferation of a gram positive bacterium. In certain embodiments the composition is effective to kill or inhibit the growth and/or proliferation of A. naeslundii, and the composition comprises one or more peptides, the amino acid sequences of the peptides comprising one or more sequences selected from the group of amino acid sequences listed in Table 4 and/or Table 5 identified as effective to effective to kill or inhibit the growth and/or proliferation of A. naeslundii. In certain embodiments the composition is effective to kill or inhibit the growth and/or proliferation of B. subtilis, and the composition comprises one or more peptides, the amino acid sequences of the peptides comprising one or more sequences selected from the group of amino acid sequences listed in Table 4 and/or Table 5 identified as effective to effective to kill or inhibit the growth and/or proliferation of B. subtilis. In certain embodiments the composition is effective to kill or inhibit the growth and/or proliferation of C. difficile, and the composition comprises one or more peptides, the amino acid sequences of the peptides comprising one or more sequences selected from the group of amino acid sequences listed in Table 4 and/or Table 5 identified as effective to effective to kill or inhibit the growth and/or proliferation of C. difficile. In certain embodiments the composition is effective to kill or inhibit the growth and/or proliferation of C. jeikeium, and the composition comprises one or more peptides, the amino acid sequences of the peptides comprising one or more sequences selected from the group of amino acid sequences listed in Table 4 and/or Table 5 identified as effective to effective to kill or inhibit the growth and/or proliferation of C. jeikeium. In certain embodiments the composition is effective to kill or inhibit the growth and/or proliferation of E. faecalis, and the composition comprises one or more peptides, the amino acid sequences of the peptides comprising one or more sequences selected from the group of amino acid sequences listed in Table 4 and/or Table 5 identified as effective to effective to kill or inhibit the growth and/or proliferation of E. faecalis. In certain embodiments the composition is effective to kill or inhibit the growth and/or proliferation of M. luteus, and the composition comprises one or more peptides, the amino acid sequences of the peptides comprising one or more sequences selected from the group of amino acid sequences listed in Table 4 and/or Table 5 identified as effective to effective to kill or inhibit the growth and/or proliferation of M. luteus. In certain embodiments the composition is effective to kill or inhibit the growth and/or proliferation of MRSA, and the composition comprises one or more peptides, the amino acid sequences of the peptides comprising one or more sequences selected from the group of amino acid sequences listed in Table 4 and/or Table 5 identified as effective to effective to kill or inhibit the growth and/or proliferation of MRSA. In certain embodiments composition is effective to kill or inhibit the growth and/or proliferation of S. epidermidis, and the composition comprises one or more peptides, the amino acid sequences of the peptides comprising one or more sequences selected from the group of amino acid sequences listed in Table 4 and/or Table 5 identified as effective to effective to kill or inhibit the growth and/or proliferation of S. epidermidis. In certain embodiments the composition is effective to kill or inhibit the growth and/or proliferation of S. mutans, and the composition comprises one or more peptides, the amino acid sequences of the peptides comprising one or more sequences selected from the group of amino acid sequences listed in Table 4 and/or Table 5 identified as effective to effective to kill or inhibit the growth and/or proliferation of S. mutans. In certain embodiments the composition is effective to kill or inhibit the growth and/or proliferation of S. pneumoniae, and the composition comprises one or more peptides, the amino acid sequences of the peptides comprising one or more sequences selected from the group of amino acid sequences listed in Table 4 and/or Table 5 identified as effective to effective to kill or inhibit the growth and/or proliferation of S. pneumoniae. In certain embodiments the composition is effective to kill or inhibit the growth and/or proliferation of a gram negative bacterium, and the composition comprises one or more peptides, the amino acid sequences of the peptides comprising one or more sequences selected from the group of amino acid sequences listed in Table 4 and/or Table 5 identified as effective to effective to kill or inhibit the growth and/or proliferation of a gram negative bacterium. In certain embodiments the composition is effective to kill or inhibit the growth and/or proliferation of A. baumannii, and the composition comprises one or more peptides, the amino acid sequences of the peptides comprising one or more sequences selected from the group of amino acid sequences listed in Table 4 and/or Table 5 identified as effective to effective to kill or inhibit the growth and/or proliferation of A. baumannii. In certain embodiments the composition is effective to kill or inhibit the growth and/or proliferation of C. jejuni, and the composition comprises one or more peptides, the amino acid sequences of the peptides comprising one or more sequences selected from the group of amino acid sequences listed in Table 4 and/or Table 5 identified as effective to effective to kill or inhibit the growth and/or proliferation of C. jejuni. In certain embodiments the composition is effective to kill or inhibit the growth and/or proliferation of E. coli, and the composition comprises one or more peptides, the amino acid sequences of the peptides comprising one or more sequences selected from the group of amino acid sequences listed in Table 4 and/or Table 5 identified as effective to effective to kill or inhibit the growth and/or proliferation of E. coli. In certain embodiments the composition is effective to kill or inhibit the growth and/or proliferation of F. nucleatum, and the composition comprises one or more peptides, the amino acid sequences of the peptides comprising one or more sequences selected from the group of amino acid sequences listed in Table 4 and/or Table 5 identified as effective to effective to kill or inhibit the growth and/or proliferation of F. nucleatum. In certain embodiments the composition is effective to kill or inhibit the growth and/or proliferation of E. coli, and the composition comprises one or more peptides, the amino acid sequences of the peptides comprising one or more sequences selected from the group of amino acid sequences listed in Table 4 and/or Table 5 identified as effective to effective to kill or inhibit the growth and/or proliferation of M. xanthus. In certain embodiments the composition is effective to kill or inhibit the growth and/or proliferation of P. aeruginosa, and the composition comprises one or more peptides, the amino acid sequences of the peptides comprising one or more sequences selected from the group of amino acid sequences listed in Table 4 and/or Table 5 identified as effective to effective to kill or inhibit the growth and/or proliferation of P. aeruginosa. In certain embodiments the composition is effective to kill or inhibit the growth and/or proliferation of P. gingivalis, and the composition comprises one or more peptides, the amino acid sequences of the peptides comprising one or more sequences selected from the group of amino acid sequences listed in Table 4 and/or Table 5 identified as effective to effective to kill or inhibit the growth and/or proliferation of P. gingivalis. In certain embodiments the composition is effective to kill or inhibit the growth and/or proliferation of P. mirabilis, and the composition comprises one or more peptides, the amino acid sequences of the peptides comprising one or more sequences selected from the group of amino acid sequences listed in Table 4 and/or Table 5 identified as effective to effective to kill or inhibit the growth and/or proliferation of P. mirabilis.

[0014] In various embodiments one or more of the peptides comprising the composition comprise all “L” amino acids or all “D” amino acids, or a mixture of “L” and “D” amino acids. In various embodiments one or more of the peptides comprising the composition are β peptides. In various embodiments one or more of the peptides comprising the composition comprise one or more protecting groups (e.g. protected carboxyl and/or amino termini). In various embodiments one or more of the peptides comprising the composition comprise an amide on the carboxyl terminus and/or an acetyl on the amino terminus. In various embodiments the peptides comprising the composition are in a pharmaceutically acceptable carrier. In certain embodiments the carrier is suitable for administration via a route selected from the group consisting of topical administration, aerosol administration, administration via inhalation, oral administration, and/or rectal administration.

[0015] In various embodiments methods are provided for killing and/or inhibiting the growth and/or proliferation of a microorganism and or for disrupting and/or inhibiting the growth and/or maintenance of a biofilm, the method comprising contacting the microorganism (or a biofilm comprising the microorganism) with a chimeric construct as described herein (e.g., see description above, and/or a chimeric construct according to any one of claims 1-29), or with an antimicrobial peptide as described herein, and/or with a composition as described herein (e.g., a composition according to any one of claims 30-65). In certain embodiments the microorganism is a yeast or fungus and the chimeric construct or composition is a chimeric construct comprising an effector identified as killing a yeast or fungus, or a composition comprising an antimicrobial peptide described herein as killing a yeast or fungus. In certain embodiments the microorganism is a bacterium (e.g., gram negative and/or gram positive bacterium) and the chimeric construct or composition is a chimeric construct comprising an effector identified as killing a bacterium (e.g., gram negative and/or gram positive bacterium), or a composition comprising an antimicrobial peptide described herein as killing a gram negative and/or gram positive bacterium. In certain embodiments the effector is an antimicrobial peptide. In certain embodiments he microorganism is S. mutans, and the chimeric construct or composition is applied to the oral cavity of an animal or human, e.g., to reduces the incidence or severity of dental caries and/or periodontal disease). In certain embodiments the chimeric construct or composition preferentially targets Corynebacterium spp. and the chimeric construct or composition is applied to the skin surface of an animal or human (e.g., to reduce body odor).

[0016] Methods are also provided for disinfecting a surface. The methods typically involve contacting the surface with one or more chimeric constructs described herein (e.g. a construct according to any one of claims 1-29), or a composition as described herein (e.g., a composition according to any one of claims 30-65). In certain embodiments, the surface comprises a surface of a prosthesis or medical implant. In certain embodiments the surface comprises a surface of a medical device. In certain embodiments the surface comprises a surface of a plant or foodstuff. In certain embodiments the chimeric construct and/or the antimicrobial peptide(s) are combined with a second disinfectant selected from the group consisting of other antimicrobial agent is a disinfectant selected from the group consisting of acetic acid, phosphoric acid, citric acid, lactic, formic, propionic acid, hydrochloric acid, sulfuric acid, nitric acid, sodium hydroxide, potassium hydroxide, sodium carbonate, ammonium hydroxide, ethyl alcohol, isopropyl alcohol, phenol, formaldehyde, glutaraldehyde, hypochlorites, chlorine dioxide, sodium dichloroisocyanurate, chloramine-T, iodine, povidone-iodine, chlorhexidine, hydrogen peroxide, peracetic acid, and benzalkonium chloride.

[0017] In various embodiments the use of a chimeric construct described herein and/or an antimicrobial composition as described herein (e.g., a chimeric construct according to any one of claims 1-29, or a composition according to any one of claims 30-65) in the manufacture of a medicament for killing and/or inhibiting the growth and/or proliferation of a microorganism and/or inhibiting the growth and/or maintenance of a biofilm comprising the microorganism is provided. In certain embodiments the microorganism is a yeast or fungus and the chimeric construct or composition is a chimeric construct comprising an effector identified as killing a yeast or fungus, or a composition comprising an antimicrobial peptide described herein as killing a yeast or fungus. In certain embodiments the microorganism is a bacterium (e.g., gram negative and/or gram positive bacterium) and the chimeric construct or composition is a chimeric construct comprising an effector identified as killing a bacterium (e.g., gram negative and/or gram positive bacterium), or a composition comprising an antimicrobial peptide described herein as killing a gram negative and/or gram positive bacterium. In certain embodiments the effector is an antimicrobial peptide.

[0018] In various embodiments methods are also provided for of detecting a bacterium and/or a bacterial film (e.g., a biofilm comprising the bacteria). The methods typically involve contacting the bacterium or bacterial film with a composition comprising a detectable label attached to a targeting peptide comprising one or more amino acid sequences found Table 3 and/or Table 12; and detecting the detectable label where the quantity and/or location of the detectable label is an indicator of the presence of the bacterium and/or bacterial film. In certain embodiments the targeting peptide comprises or consists of an amino acid sequence of a peptide found in Table 3 (and/or the retro, inverso, retroinverso form of the sequence). In certain embodiments the detectable label is a label selected from the group consisting of a radioactive label, a radio-opaque label, a fluorescent dye, a fluorescent protein, an enzymatic label, a colorimetric label, and a quantum dot.

[0019] Certain compositions are also provided comprising a photosensitizing or photoactivatable agent attached to a targeting peptide (e.g., a peptide comprising an amino acid sequence of a peptide found in Table 3 and/or Table 12). In certain embodiments the targeting peptide comprises or consists of an amino acid sequence of a peptide found in Table 3. In certain embodiments the photosensitizing agent is an agent selected from the group consisting of a porphyrinic macrocycle, a porphyrin, a chlorine, a crown ether, an acridine, an azine, a phthalocyanine, a cyanine, a psoralen, a cucumin, and a perylenequinonoid. In certain embodiments the photosensitizing agent comprises one or more agents agent shown in any of FIGS. 1-12. In certain embodiments the photosensitizing agent is attached to the targeting peptide by a non-peptide linker (e.g., a polyethylene glycol (PEG)). In certain embodiments the photosensitizing agent is attached to the targeting peptide by a non-peptide linker found in Table 16.

[0020] In various embodiments methods are provided for killing and/or for inhibiting the growth and/or proliferation of a microorganism or a biofilm comprising a microorganism, where the methods involve contacting the microorganism or biofilm with a composition comprising a photosensitizing or photoactivatable agent attached to a targeting peptide (e.g., a peptide comprising an amino acid sequence of a peptide found in Table 3 and/or Table 12). In certain embodiments the targeting peptide comprises or consists of an amino acid sequence of a peptide found in Table 3. In certain embodiments the photosensitizing agent is an agent selected from the group consisting of a porphyrinic macrocycle, a porphyrin, a chlorine, a crown ether, an acridine, an azine, a phthalocyanine, a cyanine, a psoralen, a cucumin, and a perylenequinonoid. In certain embodiments the photosensitizing agent comprises one or more agents agent shown in any of FIGS. 1-12. In certain embodiments the photosensitizing agent is attached to the targeting peptide by a non-peptide linker (e.g., a polyethylene glycol (PEG)). In certain embodiments the photosensitizing agent is attached to the targeting peptide by a non-peptide linker found in Table 16. In certain embodiments the method further comprises exposing the microorganism or biofilm to a light source. In certain embodiments the microorganism is a microorganism selected from the group consisting of a bacterium (e.g., a gram positive and/or a gram negative bacterium), a yeast, a fungus, a protozoan, and a virus. In certain embodiments the biofilm comprises a bacterial film. In certain embodiments the biofilm is a biofilm on an implanted or implantable medical device. In certain embodiments the microorganism or biofilm is an organism or biofilm in an oral cavity.

[0021] In various embodiments certain formulations are provided. Typical formulations include, but are not limited to a targeting peptide, an antimicrobial peptide, and/or a STAMP; and a salt at a concentration comparable to that found in phosphate buffered saline (PBS) ranging from about 0.5× PBS to about 2.5× PBS. In certain embodiments the formulation comprises a targeting peptide found in Tables 3 or 10. In certain embodiments the formulation comprises an anti-S. mutans peptide targeting peptide (e.g., as identified in Tables 3 or 12). In certain embodiments the anti-S. mutans targeting peptide has the amino acid sequence TFFRLFNRSFTQALGK (SEQ ID NO:1). In certain embodiments the anti-S. mutans targeting peptide is attached to an antimicrobial peptide. In certain embodiments the antimicrobial peptide is a peptide found in Tables 4, 5, or 14. In certain embodiments the antimicrobial peptide has the amino acid sequence KNLRIIRKGIHIIKKY (SEQ ID NO:3080). In certain embodiments the formulation comprises the amino acid sequence of the C16G2 STAMP (TFFRLFNRSFTQALGKGGGKNLRIIRKGIHIIKKY, (SEQ ID NO:2). In various embodiments the targeting peptide, antimicrobial peptide, and/or a STAMP bears one or more protecting groups. In certain embodiments the protecting group(s) are independently selected from the group consisting of acetyl, amide, 3 to 20 carbon alkyl groups, Fmoc, Tboc, 9-fluoreneacetyl group, 1-fluorenecarboxylic group, 9-florenecarboxylic group, 9-fluorenone-1-carboxylic group, benzyloxycarbonyl, Xanthyl (Xan), Trityl (Trt), 4-methyltrityl (Mtt), 4-methoxytrityl (Mmt), 4-methoxy-2,3,6-trimethyl-benzenesulphonyl (Mtr), Mesitylene-2-sulphonyl (Mts), 4,4-dimethoxybenzhydryl (Mbh), Tosyl (Tos), 2,2,5,7,8-pentamethyl chroman-6-sulphonyl (Pmc), 4-methylbenzyl (MeBzl), 4-methoxybenzyl (MeOBzl), Benzyloxy (BzlO), Benzyl (Bzl), Benzoyl (Bz), 3-nitro-2-pyridinesulphenyl (Npys), 1-(4,4-dimentyl-2,6-diaxocyclohexylidene)ethyl (Dde), 2,6-dichlorobenzyl (2,6-DiCl-Bzl), 2-chlorobenzyloxycarbonyl (2-Cl-Z), 2-bromobenzyloxycarbonyl (2-Br-Z), Benzyloxymethyl (Bom), t-butoxycarbonyl (Boc), cyclohexyloxy (cHxO), t-butoxymethyl (Bum), t-butoxy (tBuO), t-Butyl (tBu), and Trifluoroacetyl (TFA). In certain embodiments the targeting peptide, antimicrobial peptide, and/or a STAMP is amidated at the carboxyl terminus and/or bears an acetyl group at the amino terminus. In certain embodiments the pH of the formulation ranges from about pH 5.0 to about pH 8.5. In certain embodiments the pH is about pH 7.4. In various embodiments the salt is at a concentration comparable to that found in 1× PBS. In certain embodiments the formulation comprises PBS. In certain embodiments the formulation of further comprising ethanol, and/or glycerin, and/or polyethylene glycol, and/or fluoride.

### DEFINITIONS

[0022] The term “peptide” as used herein refers to a polymer of amino acid residues typically ranging in length from 2 to about 50 or about 60 residues. In certain embodiments the peptide ranges in length from about 2, 3, 4, 5, 7, 9, 10, or 11 residues to about 60, 50, 45, 40, 45, 30, 25, 20, or 15 residues. In certain embodiments the peptide ranges in length from about 8, 9, 10, 11, or 12 residues to about 15, 20 or 25 residues. In certain embodiments the amino acid residues comprising the peptide are “L-form” amino acid residues, however, it is recognized that in various embodiments, “D” amino acids can be incorporated into the peptide. Peptides also include amino acid polymers in which one or more amino acid residues is an artificial chemical analogue of a corresponding naturally occurring amino acid, as well as to naturally occurring amino acid polymers. In addition, the term applies to amino acids joined by a peptide linkage or by other, “modified linkages” (e.g., where the peptide bond is replaced by an α-ester, a β-ester, a thioamide, phosphonamide, carbonate, hydroxylate, and the like (see, e.g., Spatola, (1983) Chem. Biochem. Amino Acids and Proteins 7: 267-357), where the amide is replaced with a saturated amine (see, e.g., Skiles et al., U.S. Pat. No. 4,496,542, which is incorporated herein by reference, and Kaltenbronn et al., (1990) Pp. 969-970 in Proc. 11th American Peptide Symposium, ESCOM Science Publishers, The Netherlands, and the like)).

[0023] The term “residue”” as used herein refers to natural, synthetic, or modified amino acids. Various amino acid analogues include, but are not limited to 2-aminoadipic acid, 3-aminoadipic acid, beta-alanine (beta-aminopropionic acid), 2-aminobutyric acid, 4-aminobutyric acid, piperidinic acid, 6-aminocaproic acid, 2-aminoheptanoic acid, 2-aminoisobutyric acid, 3-aminoisobutyric acid, 2-aminopimelic acid, 2,4 diaminobutyric acid, desmosine, 2,2′-diaminopimelic acid, 2,3-diaminopropionic acid, n-ethylglycine, n-ethylasparagine, hydroxylysine, allo-hydroxylysine, 3-hydroxyproline, 4-hydroxyproline, isodesmosine, allo-isoleucine, n-methylglycine, sarcosine, n-methylisoleucine, 6-n-methyllysine, n-methylvaline, norvaline, norleucine, ornithine, and the like. These modified amino acids are illustrative and not intended to be limiting.

[0024] “β-peptides” comprise of “β amino acids”, which have their amino group bonded to the β carbon rather than the α-carbon as in the 20 standard biological amino acids. The only commonly naturally occurring β amino acid is β-alanine

[0025] Peptoids, or N-substituted glycines, are a specific subclass of peptidomimetics. They are closely related to their natural peptide counterparts, but differ chemically in that their side chains are appended to nitrogen atoms along the molecule's backbone, rather than to the α-carbons (as they are in natural amino acids).

[0026] The terms “conventional” and “natural” as applied to peptides herein refer to peptides, constructed only from the naturally-occurring amino acids: Ala, Cys, Asp, Glu, Glu, Phe, Gly, His, Ile, Lys, Leu, Met, Asn, Pro, Gln, Arg, Ser, Thr, Val, Trp, and Tyr. A compound of the invention “corresponds” to a natural peptide if it elicits a biological activity (e.g., antimicrobial activity) related to the biological activity and/or specificity of the naturally occurring peptide. The elicited activity may be the same as, greater than or less than that of the natural peptide. In general, such a peptoid will have an essentially corresponding monomer sequence, where a natural amino acid is replaced by an N-substituted glycine derivative, if the N-substituted glycine derivative resembles the original amino acid in hydrophilicity, hydrophobicity, polarity, etc. The following are illustrative, but non-limiting N-substituted glycine replacements: N-(1-methylprop-1-yl)glycine substituted for isoleucine (Ile), N-(prop-2-yl)glycine for valine (Val), N-benzylglycine for phenylanlaine (Phe), N-(2-hydroxyethyl)glycine for serine (Ser), and the like. In certain embodiments substitutions need not be “exact”. Thus for example, in certain embodiments N-(2-hydroxyethyl)glycine may substitute for Ser, Thr, Cys, and/or Met; N-(2-methylprop-1-yl)glycine may substitute for Val, Leu, and/or Ile. In certain embodiments N-(2-hydroxyethyl)glycine can be used to substitute for Thr and Ser, despite the structural differences: the side chain in N-(2-hydroxyethyl)glycine is one methylene group longer than that of Ser, and differs from Thr in the site of hydroxy-substitution. In general, one may use an N-hydroxyalkyl-substituted glycine to substitute for any polar amino acid, an N-benzyl-or N-aralkyl-substituted glycine to replace any aromatic amino acid (e.g., Phe, Trp, etc.), an N-alkyl-substituted glycine such as N-butylglycine to replace any nonpolar amino acid (e.g., Leu, Val, Ile, etc.), and an N-(aminoalkyl)glycine derivative to replace any basic polar amino acid (e.g., Lys and Arg).

[0027] Where an amino acid sequence is provided herein, L-, D-, or beta amino acid versions of the sequence are also contemplated as well as retro, inversion, and retro-inversion isoforms. In addition, conservative substitutions (e.g., in the binding peptide, and/or antimicrobial peptide, and/or linker peptide) are contemplated. Non-protein backbones, such as PEG, alkane, ethylene bridged, ester backbones, and other backbones are also contemplated. Also fragments ranging in length from about 5, 6, 7, 8, 9, 10, 11, 12, 13, 14, 15, 16, 17, 18, 19, 20, 21, 22, 23, 24, or 25 amino acids up to the full length minus one amino acid of the peptide are contemplated where the fragment retains at least 50%, preferably at least 60% 70% or 80%, more preferably at least 90%, 95%, 98%, 99%, or at least 100% of the activity (e.g., binding specificity and/or avidity, antimicrobial activity, etc.) of the full length peptide are contemplated.

[0028] A “compound antimicrobial peptide” or “compound AMP” refers to a construct comprising two or more AMPs joined together. The AMPs can be joined directly or through a linker. They can be chemically conjugated or, where joined directly together or through a peptide linker can comprise a fusion protein.

[0029] In certain embodiments, conservative substitutions of the amino acids comprising any of the sequences described herein are contemplated. In various embodiments one, two, three, four, or five different residues are substituted. The term “conservative substitution” is used to reflect amino acid substitutions that do not substantially alter the activity (e.g., antimicrobial activity and/or specificity) of the molecule. Typically conservative amino acid substitutions involve substitution one amino acid for another amino acid with similar chemical properties (e.g. charge or hydrophobicity). Certain conservative substitutions include “analog substitutions” where a standard amino acid is replaced by a non-standard (e.g., rare, synthetic, etc) amino acid differing minimally from the parental residue. Amino acid analogs are considered to be derived synthetically from the standard amino acids without sufficient change to the structure of the parent, are isomers, or are metabolite precursors. Examples of such “analog substitutions” include, but are not limited to, 1) Lys-Orn, 2) Leu-Norleucine, 3) Lys-Lys[TFA], 4) Phe-Phe[Gly], and 5) δ-amino butylglycine-ξ-amino hexylglycine, where Phe[gly] refers to phenylglycine(a Phe derivative with a H rather than CH₃ component in the R group), and Lys[TFA] refers to a Lys where a negatively charged ion (e.g., TFA) is attached to the amine R group. Other conservative substitutions include “functional substitutions” where the general chemistries of the two residues are similar, and can be sufficient to mimic or partially recover the function of the native peptide. Strong functional substitutions include, but are not limited to 1) Gly/Ala, 2) Arg/Lys, 3) Ser/Tyr/Thr, 4) Leu/Ile/Val, 5) Asp/Glu, 6) Gln/Asn, and 7) Phe/Trp/Tyr, while other functional substitutions include, but are not limited to 8) Gly/Ala/Pro, 9) Tyr/His, 10) Arg/Lys/His, 11) Ser/Thr/Cys, 12) Leu/Ile/Val/Met, and 13) Met/Lys (special case under hydrophobic conditions). Various “broad conservative substations” include substitutions where amino acids replace other amino acids from the same biochemical or biophysical grouping. This is similarity at a basic level and stems from efforts to classify the original 20 natural amino acids. Such substitutions include 1) nonpolar side chains: Gly/Ala/Val/Leu/Ile/Met/Pro/Phe/Trp, and/or 2) uncharged polar side chains Ser/Thr/Asn/Gln/Tyr/Cys. In certain embodiments broad-level substitutions can also occur as paired substitutions. For example, Any hydrophilic neutral pair [Ser, Thr, Gln, Asn, Tyr, Cys]+[Ser, Thr, Gln, Asn, Tyr, Cys] can may be replaced by a charge-neutral charged pair [Arg, Lys, His]+[Asp, Glu]. The following six groups each contain amino acids that, in certain embodiments, are typical conservative substitutions for one another: 1) Alanine (A), Serine (S), Threonine (T); 2) Aspartic acid (D), Glutamic acid (E); 3) Asparagine (N), Glutamine (Q); 4) Arginine (R), Lysine (K), Histidine (H); 5) Isoleucine (I), Leucine (L), Methionine (M), Valine (V); and 6) Phenylalanine (F), Tyrosine (Y), Tryptophan (W). Where amino acid sequences are disclosed herein, amino acid sequences comprising, one or more of the above-identified conservative substitutions are also contemplated.

[0030] In certain embodiments, targeting peptides, antimicrobial peptides, and/or STAMPs compromising at least 80%, preferably at least 85% or 90%, and more preferably at least 95% or 98% sequence identity with any of the sequences described herein are also contemplated. The terms “identical” or percent “identity,” refer to two or more sequences that are the same or have a specified percentage of amino acid residues that are the same, when compared and aligned for maximum correspondence, as measured using one of the following sequence comparison algorithms or by visual inspection. With respect to the peptides of this invention sequence identity is determined over the full length of the peptide. For sequence comparison, typically one sequence acts as a reference sequence, to which test sequences are compared. When using a sequence comparison algorithm, test and reference sequences are input into a computer, subsequence coordinates are designated, if necessary, and sequence algorithm program parameters are designated. The sequence comparison algorithm then calculates the percent sequence identity for the test sequence(s) relative to the reference sequence, based on the designated program parameters. Optimal alignment of sequences for comparison can be conducted, e.g., by the local homology algorithm of Smith & Waterman (1981) Adv. Appl. Math. 2: 482, by the homology alignment algorithm of Needleman & Wunsch (1970) J. Mol. Biol. 48: 443, by the search for similarity method of Pearson & Lipman (1988) Proc. Natl. Acad. Sci., USA, 85: 2444, by computerized implementations of these algorithms (GAP, BESTFIT, FASTA, and TFASTA in the Wisconsin Genetics Software Package, Genetics Computer Group, 575 Science Dr., Madison, Wis.), or by visual inspection.

[0031] The term “specificity” when used with respect to the antimicrobial activity of a peptide indicates that the peptide preferentially inhibits growth and/or proliferation and/or kills a particular microbial species as compared to other related and/or unrelated microbes. In certain embodiments the preferential inhibition or killing is at least 10% greater (e.g., LD₅₀ is 10% lower), preferably at least 20%, 30%, 40%, or 50%, more preferably at least 2-fold, at least 5-fold, or at least 10-fold greater for the target species.

[0032] “Treating” or “treatment” of a condition as used herein may refer to preventing the condition, slowing the onset or rate of development of the condition, reducing the risk of developing the condition, preventing or delaying the development of symptoms associated with the condition, reducing or ending symptoms associated with the condition, generating a complete or partial regression of the condition, or some combination thereof.

[0033] The term “consisting essentially of” when used with respect to an antimicrobial peptide (AMP) or AMP motif as described herein, indicates that the peptide or peptides encompassed by the library or variants, analogues, or derivatives thereof possess substantially the same or greater antimicrobial activity and/or specificity as the referenced peptide. In certain embodiments substantially the same or greater antimicrobial activity indicates at least 80%, preferably at least 90%, and more preferably at least 95% of the anti microbial activity of the referenced peptide(s) against a particular bacterial species (e.g., S. mutans).

[0034] The term “porphyrinic macrocycle” refers to a porphyrin or porphyrin derivative. Such derivatives include porphyrins with extra rings ortho-fused, or orthoperifused, to the porphyrin nucleus, porphyrins having a replacement of one or more carbon atoms of the porphyrin ring by an atom of another element (skeletal replacement), derivatives having a replacement of a nitrogen atom of the porphyrin ring by an atom of another element (skeletal replacement of nitrogen), derivatives having substituents other than hydrogen located at the peripheral (meso-, .beta.-) or core atoms of the porphyrin, derivatives with saturation of one or more bonds of the porphyrin (hydroporphyrins, e.g., chlorins, bacteriochlorins, isobacteriochlorins, decahydroporphyrins, corphins, pyrrocorphins, etc.), derivatives obtained by coordination of one or more metals to one or more porphyrin atoms (metalloporphyrins), derivatives having one or more atoms, including pyrrolic and pyrromethenyl units, inserted in the porphyrin ring (expanded porphyrins), derivatives having one or more groups removed from the porphyrin ring (contracted porphyrins, e.g., corrin, corrole) and combinations of the foregoing derivatives (e.g. phthalocyanines, porphyrazines, naphthalocyanines, subphthalocyanines, and porphyrin isomers). Certain porphyrinic macrocycles comprise at least one 5-membered ring.

[0035] As used herein, an “antibody” refers to a protein consisting of one or more polypeptides substantially encoded by immunoglobulin genes or fragments of immunoglobulin genes. The recognized immunoglobulin genes include the kappa, lambda, alpha, gamma, delta, epsilon and mu constant region genes, as well as myriad immunoglobulin variable region genes. Light chains are classified as either kappa or lambda. Heavy chains are classified as gamma, mu, alpha, delta, or epsilon, which in turn define the immunoglobulin classes, IgG, IgM, IgA, IgD and IgE, respectively.

[0036] A typical immunoglobulin (antibody) structural unit is known to comprise a tetramer. Each tetramer is composed of two identical pairs of polypeptide chains, each pair having one “light” (about 25 kD) and one “heavy” chain (about 50-70 kD). The N-terminus of each chain defines a variable region of about 100 to 110 or more amino acids primarily responsible for antigen recognition. The terms variable light chain (V_{L}) and variable heavy chain (V_{H}) refer to these light and heavy chains respectively.

[0037] Antibodies exist as intact immunoglobulins or as a number of well characterized fragments produced by digestion with various peptidases. Thus, for example, pepsin digests an antibody below the disulfide linkages in the hinge region to produce F(ab)′₂, a dimer of Fab which itself is a light chain joined to V_{H}-C_{H}1 by a disulfide bond. The F(ab)′₂ may be reduced under mild conditions to break the disulfide linkage in the hinge region thereby converting the (Fab′)₂ dimer into an Fab′ monomer. The Fab′ monomer is essentially an Fab with part of the hinge region (see, Fundamental Immunology, W. E. Paul, ed., Raven Press, N.Y. (1993), for a more detailed description of other antibody fragments). While various antibody fragments are defined in terms of the digestion of an intact antibody, one of skill will appreciate that such Fab′ fragments may be synthesized de novo either chemically or by utilizing recombinant DNA methodology. Thus, the term antibody, as used herein also includes antibody fragments either produced by the modification of whole antibodies or synthesized de novo using recombinant DNA methodologies, including, but are not limited to, Fab′₂, IgG, IgM, IgA, scFv, dAb, nanobodies, unibodies, and diabodies.

[0038] In certain embodiments antibodies and fragments of the present invention can be bispecific. Bispecific antibodies or fragments can be of several configurations. For example, bispecific antibodies may resemble single antibodies (or antibody fragments) but have two different antigen binding sites (variable regions). In various embodiments bispecific antibodies can be produced by chemical techniques (Kranz et al. (1981) Proc. Natl. Acad. Sci., USA, 78: 5807), by “polydoma” techniques (see, e.g., U.S. Pat. No. 4,474,893), or by recombinant DNA techniques. In certain embodiments bispecific antibodies of the present invention can have binding specificities for at least two different epitopes, at least one of which is an epitope of a microbial organism. The microbial binding antibodies and fragments can also be heteroantibodies. Heteroantibodies are two or more antibodies, or antibody binding fragments (e.g., Fab) linked together, each antibody or fragment having a different specificity.

[0039] The term “STAMP” refers to Specifically Targeted Anti-Microbial Peptides. In various embodiments, a STAMP comprises one or more peptide targeting moieties attached to one or more antimicrobial moieties (e.g., antimicrobial peptides (AMPs)). An MH-STAMP is a STAMP bearing two or more targeting domains (i.e., a multi-headed STAMP).

[0040] The terms “isolated” “purified” or “biologically pure” refer to material which is substantially or essentially free from components that normally accompany it as found in its native state. In the case of a peptide, an isolated (naturally occurring) peptide is typically substantially free of components with which it is associated in the cell, tissue, or organism. The term isolated also indicates that the peptide is not present in a phage display, yeast display, or other peptide library.

[0041] In various embodiments the amino acid abbreviations shown in Table 1 are used herein.

TABLE 1
Amino acid abbreviations.

Abbreviation

| Name | 3 Letter | 1 Letter |
|---|---|---|
| Alanine | Ala | A |
| βAlanine (NH₂—CH₂—CH₂—COOH) | βAla | |
| Arginine | Arg | R |
| Asparagine | Asn | N |
| Aspartic Acid | Asp | D |
| Cysteine | Cys | C |
| Glutamic Acid | Glu | E |
| Glutamine | Gln | Q |
| Glycine | Gly | G |
| Histidine | His | H |
| Homoserine | Hse | — |
| Isoleucine | Ile | I |
| Leucine | Leu | L |
| Lysine | Lys | K |
| Methionine | Met | M |
| Methionine sulfoxide | Met (O) | — |
| Methionine methylsulfonium | Met (S-Me) | — |
| Norleucine | Nle | — |
| Phenylalanine | Phe | F |
| Proline | Pro | P |
| Serine | Ser | S |
| Threonine | Thr | T |
| Tryptophan | Trp | W |
| Tyrosine | Tyr | Y |
| Valine | Val | V |
| episilon-aminocaproic acid | Ahx | J |
| (NH²—(CH₂)₅—COOH) | | |
| 4-aminobutanoic acid | gAbu | |
| (NH₂—(CH₂)₃—COOH) | | |
| tetrahydroisoquinoline-3- | | O |
| carboxylic acid | | |
| Lys(N(epsilon)-trifluoroacetyl) | | K[TFA] |
| α-aminoisobutyric acid | Aib | B |

### BRIEF DESCRIPTION OF THE DRAWINGS

[0042] FIG. 1 shows some illustrative porphyrins (compounds 92-99) suitable for use as targeting moieties and/or antimicrobial effectors.

[0043] FIG. 2 shows some illustrative porphyrins (compounds 100-118) suitable for use as targeting moieties and/or antimicrobial effectors.

[0044] FIG. 3 shows some illustrative porphyrins (in particular phthalocyanines) (compounds 119-128) suitable for use as targeting moieties and/or antimicrobial effectors.

[0045] FIG. 4 illustrates the structures of two phthalocyanines, Monoastral Fast Blue B and Monoastral Fast Blue G suitable for use as targeting moieties and/or antimicrobial effectors.

[0046] FIG. 5 illustrates certain azine photosensitizers suitable for use as targeting moieties and/or antimicrobial effectors in the compositions and methods described herein.

[0047] FIG. 6 shows illustrative cyanine suitable for use as targeting moieties and/or antimicrobial effectors in the compositions and methods described herein.

[0048] FIG. 7 shows illustrative psoralen (angelicin) photosensitizers suitable for use as targeting moieties and/or antimicrobial effectors in the compositions and methods described herein.

[0049] FIG. 8 shows illustrative hypericin and the perylenequinonoid pigments suitable for use as targeting moieties and/or antimicrobial effectors in the compositions and methods described herein.

[0050] FIG. 9 shows illustrative acridines suitable for use as targeting moieties and/or antimicrobial effectors in the compositions and methods described herein.

[0051] FIG. 10 illustrates the structure of the acridine Rose Bengal.

[0052] FIG. 11 illustrates various crown ethers suitable for use as targeting moieties and/or antimicrobial effectors in the compositions and methods described herein.

[0053] FIG. 12 illustrates the structure of cumin.

[0054] FIG. 13 illustrates an example of a targeted light-activated porphyrin we have constructed: C16-P18 comprising a porphyrin coupled to a C16 (SEQ ID NO:3) targeting sequence.

[0055] FIG. 14 schematically shows some illustrative configurations for chimeric constructs described herein. A: Shows a single targeting moiety T1 attached to a single effector E1 by a linker/spacer L. B: Shows multiple targeting moieties T1, T2, T3 attached directly to each other and attached by a linker L to a single effector E1. In various embodiments T1, T2, and T3, can be domains in a fusion protein. C: Shows multiple targeting moieties T1 , T2, T3 attached to each other by linkers L and attached by a linker L to a single effector E1 . In various embodiments T1 , T2, and T3, can be domains in a fusion protein. D: Shows a single targeting moiety T1 attached by a linker L to multiple effectors E1 , E2, and E3 joined directly to each other. E: Shows a single targeting moiety T1 attached by a linker L to multiple effectors E1 , E2, and E3 joined to each other by linkers L. F: Shows multiple targeting moieties joined directly to each other and by a linker L to multiple effectors joined to each other by linkers L. G: Shows multiple targeting moieties joined to each other by linkers L and by a linker L to multiple effectors joined to each other by linkers L. In various embodiments T1 , T2, and T3, and/or E1, E2, and E3 can be domains in a fusion protein. H: Illustrates a branched configuration where multiple targeting moieties are linked to a single effector. I: Illustrates a dual branched configuration where multiple targeting moieties are linked to multiple effectors. J: Illustrates a branched configuration where multiple targeting moieties are linked to multiple effectors where the effectors are joined to each other in a linear configuration.

[0056] FIG. 15 illustrates various MH-STAMPs used in Example 1. The design, sequence, and observed mass (m/z) for M8(KH)-20 (SEQ ID NOs:4, 5, and 6), BL(KH)-20 (SEQ ID 7, 8, and 9), and M8(BL)-20 (SEQ ID 10, 11, and 12).

[0057] FIGS. 16A and 16B show HPLC and MS spectra of M8(KH)-20. The quality of the completed MH-STAMP was analyzed by HPLC (FIG. 16A) and MALDI mass spectroscopy (FIG. 16B). At UV absorbance 215 nm (260 and 280 nm are also plotted), a single major product was detected by HPLC (* retention volume 11.04 mL). After fraction collection, the correct mass (m/z) for single-charged M8(KH)-20, 4884.91 (marked by *), was observed for this peak. Y-axis: 16A, mAU miliabsorbance units; 16B, percent intensity.

[0058] FIG. 17A-17E show growth inhibitory activity of MH-STAMPs. Monocultures of S. mutans (FIG. 17A); P. aeruginosa (FIG. 17B); S. epidermidis (FIG. 17C); S. aureus (FIG. 17D); or E. coli (FIG. 17E); were treated with peptides (as indicated in the figure) for 10 min. Agent was then removed and fresh media returned. Culture recovery was measured over time (OD600). Plots represent the average of at least 3 independent experiments with standard deviations.

[0059] FIG. 18 illustrates the selective activity of dual-targeted and single-targeted MH-STAMPs in mixed culture. A mixture of P. aeruginosa (Pa), S. mutans (Sm), E. coli (Ec), and S. epidermidis (Se) planktonic cells were mixed with MH-STAMPs (as indicated in the figure) and treated 24 h. After incubation, cfu/mL of remaining constituent species were quantitated after plating to selective media. * indicates under 200 surviving cfu/mL recovered.

[0060] FIGS. 19A and 19B illustrate Rose Bengal (FIG. 19A) and synthesis scheme for C16-RB, halides and side-chains omitted for clarity (FIG. 19B).

[0061] FIG. 20 shows LC/MS profile C16-RB. Purity and molecular mass of C16-RB was confirmed by LC/MS. A single product was observed at 11.92 min with mass species at 1040.8 and 1560.25 daltons. Expected C16-RB mas: m/z=3118, m²⁺/z=1559, m³⁺/z=1039.

[0062] FIG. 21 illustrates activity of RB and C16-RB against single-species S. mutans biofilms. * indicates fewer than 100 cfu/mL recovered

[0063] FIG. 22 shows S. mutans-specific C16-RB activity. C16-RB, and not RB alone, preferentially eliminated S. mutans, and not other oral streptococci, after blue light illumination.

### DETAILED DESCRIPTION

[0064] In various embodiments, novel “targeting” peptides are identified that specifically or preferentially bind particular microorganisms (e.g., bacteria, yeasts, fungi, etc.). These peptides can be used alone to bind/capture and thereby identify and/or isolate particular target microorganisms, or they can be attached to one or more effectors (e.g., drugs, labels, etc.) and used as targeting moieties thereby providing a chimeric moiety that preferentially or specifically delivers the effector to a target microorganism, a population of target microorganisms, a microbial film, a biofilm, and the like.

[0065] In various embodiments novel peptides having antimicrobial activity against certain bacteria, fungi, yeasts, and/or viruses and/or having activity that inhibits the growth or maintenance of biofilms comprising such microorganisms are provided. The AMPs can be used to inhibit the growth and/or proliferation of a microbial species and/or the growth and/formation and/or maintenance of a biofilm comprising the microbial species.

[0066] In certain embodiments, the targeting moieties can be attached to antimicrobial peptides to form Specifically Targeted Anti-Microbial Peptides (STAMPs). In certain embodiments attachment of one or more targeting moieties/peptides to one or more antimicrobial peptides can narrow the spectrum of activity of the AMP(s) to provide efficacy against one or a few target microorganisms without substantially disrupting the remaining microbial ecology and thereby provide increased efficacy with fewer side effects.

[0067] In certain embodiments STAMPs or effector peptides can be delivered against pathogenic bacteria by being cloned and expressed in probiotic organisms for therapeutic delivery in vivo. Recombinant expression (and overexpression) and export of antimicrobial peptides and other peptides are well documented in bacteria, including species that are also utilized as probiotics.

[0068] In various embodiments the targeting peptides, antimicrobial peptides, and/or STAMPs can be formulated individually, in combination with each other, in combination with other antimicrobial peptides, and/or in combination with various antibacterial agents to provide antimicrobial reagents and/or pharmaceuticals.

[0069] Accordingly, in certain embodiments this invention provides peptides having antimicrobial activity, compositions comprising the peptides, methods of using the peptides (or compositions thereof) to inhibit the growth of or kill a wide variety of microbial targets and methods of using the peptides (or compositions thereof) to treat or prevent microbial infections and diseases related thereto in both plants and animals.

[0070] The various peptides (targeting peptides, AMPs, STAMPs, etc.) described herein exhibit antimicrobial activity, being biostatic or biocidal against a certain microbial targets, including but not limited to, Gram-negative bacteria such as Acinetobacter baumannii, Escherichia coli, Fusobacterium nucleatum, Pseudomonas aeruginosa, Porphyromonas gingivalis; Gram-positive bacteria such as Actinomyces naeslundii, Bacillus subtilis, Clostridium difficile, Enterococcus faecalis, Staphylococcus aureus (and MRSA), S. epidermidis, Streptococcus mutans, Streptococcus pneumoniae; and yeast or fungi such as Aspergillus niger, Candida albicans, Malassezia furfur, and Trichophyton rubrum (see, e.g., Table 2). Significantly, various peptides described herein are biostatic or biocidal against clinically relevant pathogens exhibiting multi-drug resistance such as, for example, methicillin-resistant Staphylococcus aureus (“MRSA”).

TABLE 2
Illustrative target microorganisms and associated pathology.

| | |
|---|---|
| Acinetobacter baumannii | Pathogenic gram-negative bacillus that is naturally sensitive |
| (A. baumannii) | to relatively few antibiotics. |
| Actinomyces naeslundii | Gram positive rod shaped bacteria that occupy the oral |
| (A. naeslundii) | cavity and are implicated in periodontal disease and root |
| | caries. |
| Aspergillus niger | A fungal infection that often causes a black mould to appear |
| (A. niger) | on some fruit and vegetables but may also infect humans |
| | through inhalation of fungal spores. |
| Bacteroides fragilis | Gram positive bacilli that are opportunistic human |
| (B. fragilis) | pathogens, causing infections of the peritoneal cavity, |
| | gastrointestinal surgery, and appendicitis via abscess |
| | formation, inhibiting phagocytosis. Resistant to a wide |
| | variety of antibiotics - β-lactams, aminoglycosides, and |
| | recently many species have acquired resistance to |
| | erythromycin and tetracycline. |
| Bacillus subtilis | Gram-positive, catalase-positive bacterium. |
| (B. subtilis) | |
| Candida albicans | Causal agent of opportunistic oral and genital fungal |
| (C. albicans) | infections in humans. |
| Clostridium difficile | A gram-positive, anaerobic, spore-forming bacillus that is |
| (C. difficile) | responsible for the development of antibiotic-associated |
| | diarrhea and colitis. |
| Corynebacterium jeikeium | Gram positive, opportunistic pathogen primarily of |
| (C. jeikeium) | immunocompromised (neutropenic) patients. Highly |
| | resistant to antibiotics |
| Campylobacter jejuni | Gram negative cause of human gastroenteritis/food |
| (C. jejuni) | poisoning. |
| Escherichia coli | Gram negative rod-shaped bacterium commonly found in the |
| (E. coli) | lower intestine of warm-blooded organisms. Certain strains |
| | cause serious food poisoning in humans. |
| Enterococcus faecalis | Gram-positive commensal bacterium |
| (E. faecalis) | |
| Fusobacterium nucleatum | Gram negative schizomycetes bacterium often seen in |
| (F. nucleatum) | necrotic tissue and implicated, but not conclusively, with |
| | other organisms in the causation and perpetuation of |
| | periodontal disease. |
| Lactobacillus acidophilus | Gram-positive commensal bacterium. |
| (L. acidophilus) | |
| Legionella pneumophila | Gram negative bacterium that is the causative agent of |
| (L. pneumophila) | legionellosis or Legionnaires' disease. |
| (Micrococcus luteus) | Gram positive, spherical, saprotrophic bacterium found in |
| M. luteus | soil, dust, water and air, and as part of the normal flora of the |
| | mammalian skin. The bacterium also colonizes the human |
| | mouth, mucosae, oropharynx and upper respiratory tract. |
| | Considered an emerging nosocomial pathogen in |
| | immunocompromised patients. |
| Mycobacterium smegmatis | Gram-variable (acid-fast) soil-dwelling organism utilized as |
| (M. smegmatis) | a proxy for Mycobacterium tuberculosis during research and |
| | development. |
| Malassezia furfur | Yeast - cutaneous pathogen. |
| (M. furfur) | |
| Methicillin-resistant | Any strain of Staphylococcus aureus bacteria (gram positive) |
| Staphylococcus aureus | that is resistant to a one or more members of a large group of |
| (MRSA) | antibiotics called the beta-lactams. Responsible for skin and |
| | systemic infections. |
| Myxococcus xanthus | Gram negative cells that form biofilms and display primitive |
| (M. xanthus) | social motility and fruiting body organization. |
| Pseudomonas aeruginosa | Gram-negative rod. Frequent opportunistic pathogen and |
| P. aeruginosa | infects burn wounds. Causes ear infections in children. |
| | Infects the lungs of cystic fibrosis patients. |
| Porphyromonas gingivalis | Non-motile, gram-negative, rod-shaped, anaerobic |
| (P. gingivalis) | pathogenic bacterium (periodontal disease) |
| Progeussmirabilis | Gram-negative, facultatively anaerobic bacterium. Causes |
| (P. mirabilis) | 90% of all ‘Proteus’ infections in humans. |
| S. epidermidis | Gram-positive, coagulase-negative cocci. Nosocomial |
| (S. epidermidis) | pathogen associated with infection (biofilm) of implanted |
| | medical device. |
| Streptococcus mutans | Gram-positive, facultatively anaerobic bacterium commonly |
| (S. mutans) | found in the human oral cavity and is a significant |
| | contributor to tooth decay |
| Streptococcus pneumoniae | Gram-positive, alpha-hemolytic, bile soluble aerotolerant |
| (S. pneumoniae) | anaerobe. Causal agent for streptococcal pneumonia. |
| Treponema denticola | Gram-negative oral spirochete associated with the incidence |
| (T. denticola) | and severity of human periodontal disease. |
| Trichophyton rubrum | Most common cause of athlete's foot, jock itch and |
| (T. rubrum) | ringworm. |

[0071] The various agents described herein (targeting peptides, compound targeting peptides, antimicrobial peptides (AMPs) and/or compound AMPs, STAMPs and/or other chimeric moieties). or compositions thereof, are useful as biocidal or biostatic or fungicidal or fungistatic agents and/or virucidal agents in a wide variety of applications. For example, the agents can be used to disinfect or preserve a variety of materials including medical instruments, foodstuffs, medicaments, cosmetics and other nutrient-containing materials. Various peptides described herein are particularly useful as bacteriostatic or bactericidal agents against multi-drug-resistant pathogens such as MRSA in a variety of clinical settings.

[0072] The agents described herein, or compositions thereof, are also useful for the prophylaxis or treatment of microbial infections and diseases related thereto in both plants and animals. Such diseases include, but are not limited to, Gram-negative and Gram-positive bacterial infections, endocarditis, pneumonia and other respiratory infections, urinary tract infections, systemic candidiasis, oral mucositis, fungal infections, biofilm formation or maintenance (e.g., on medical implants), and the like.

[0073] In various embodiments, the agents described herein can be formulated individually, in combination with each other, in combination with other antimicrobial peptides, and/or in combination with various antibiotic (e.g., antibacterial) agents in “home healthcare” formulations. Such formulations include, but are not limited to toothpaste, mouthwash, tooth whitening strips or solutions, contact lens storage, wetting, or cleaning solutions, dental floss, toothpicks, toothbrush bristles, oral sprays, oral lozenges, nasal sprays, aerosolizers for oral and/or nasal application, wound dressings (e.g., bandages), and the like.

[0074] Such applications are illustrative and not limiting. Using the teachings provided herein other uses of the AMPs and compositions described herein will be recognized by one of

### I. Targeting Peptides.

[0075] A) Uses of Targeting Peptides.

[0076] The novel microorganism-binding peptides (targeting peptides) described herein can be used to preferentially or specifically deliver an effector to a microorganism (e.g., a bacterium, a fungus, a protozoan, an algae, etc.), to a bacterial film, to a biofilm, and the like. The targeting peptides described herein can be used to bind to and thereby label particular targets, and/or as capture reagents to bind target microorganisms and thereby provide an indicator of the presence and/or quantity of the target microorganism(s). In certain embodiments the targeting peptide can be attached to an effector such as an epitope tag and/or a detectable label and thereby facilitate the identification of the presence and/or location, and/or quantity of the target (e.g., target organism). Thus targeting moieties are thus readily adapted for use in in vivo diagnostics, and/or ex vivo assays. Moreover, because of small size and good stability, microorganism binding peptides are well suited for microassay systems (e.g., microfluidic assays (Lab on a Chip), microarray assays, and the like).

[0077] In certain embodiments the microorganism binding peptides (targeting peptides) can be attached to an effector that has antimicrobial activity (e.g., an antimicrobial peptide, an antibacterial and/or antifungal, a vehicle that contains an antibacterial or antifungal, etc. In various embodiments these chimeric moieties can be used in vivo, or ex vivo to preferentially inhibit or kill the target organism(s).

[0078] In certain embodiments the targeting peptides can be recombinantly expressed as part of a yeast or phage tail fiber or coat protein to enhance binding of the yeast or phage to a specific bacterial Gram-designation, genus, species, or strain. Phage with expressed peptides will then display altered infection selectivity towards a designed target bacteria for use in phage therapy. Cloning the DNA encoding a peptide of interest into the major or minor coat proteins of a bacteriophage, for example in Proteins I through VIII of phages SAP-2, M13, or T7, will result in a targeted phage expressing 1-200 copies of the targeting peptide on the phage surface.

[0079] In certain embodiments the targeting peptides can be used in various pre-targeting p rotocols. In pre-targeting protocols, a chimeric molecule is utilized comprising a primary targeting species (e.g. a microorganism-binding peptide) that specifically binds the desired target (e.g. a bacterium) and an effector that provides a binding site that is available for binding by a subsequently administered second targeting species. Once sufficient accretion of the primary targeting species (the chimeric molecule) is achieved, a second targeting species comprising (i) a diagnostic or therapeutic agent and (ii) a second targeting moiety, that recognizes the available binding site of the primary targeting species, is administered.

[0080] An illustrative example of a pre-targeting protocol is the biotin-avidin system for administering a cytotoxic radionuclide to a tumor. In a typical procedure, a monoclonal antibody targeted against a tumor-associated antigen is conjugated to avidin and administered to a patient who has a tumor recognized by the antibody. Then the therapeutic agent, e.g., a chelated radionuclide covalently bound to biotin, is administered. The radionuclide, via its attached biotin is taken up by the antibody-avidin conjugate pretargeted at the tumor. Examples of pre-targeting biotin/avidin protocols are described, for example, in Goodwin et al., U.S. Pat. No. 4,863,713; Goodwin et al. (1988) J. Nucl. Med. 29: 226; Hnatowich et al. (1987) J. Nucl. Med. 28: 1294; Oehr et al. (1988) J. Nucl. Med. 29: 728; Klibanov et al. (1988) J. Nucl. Med. 29: 1951; Sinitsyn et al. (1989) J. Nucl. Med. 30: 66; Kalofonos et al. (1990) J. Nucl. Med. 31: 1791; Schechter et al. (1991) Int. J. Cancer 48:167; Paganelli et al. (1991) Cancer Res. 51: 5960; Paganelli et al. (1991) Nucl. Med. Commun. 12: 211; Stickney et al. (1991) Cancer Res. 51: 6650; and Yuan et al. (1991) Cancer Res. 51:3119.

[0081] It will be recognized that the tumor-specific antibody used for cancer treatments can be replaced with a microorganism binding peptide of the present invention and similar pre-targeting strategies can be used to direct labels, antibiotics, and the like to the target organism(s).

[0082] Three-step pre-targeting protocols in which a clearing agent is administered after the first targeting composition has localized at the target site also have been described. The clearing agent binds and removes circulating primary conjugate which is not bound at the target site, and prevents circulating primary targeting species (antibody-avidin or conjugate, for example) from interfering with the targeting of active agent species (biotin-active agent conjugate) at the target site by competing for the binding sites on the active agent-conjugate. When antibody-avidin is used as the primary targeting moiety, excess circulating conjugate can be cleared by injecting a biotinylated polymer such as biotinylated human serum albumin. This type of agent forms a high molecular weight species with the circulating avidin-antibody conjugate which is quickly recognized by the hepatobiliary system and deposited primarily in the liver.

[0083] Examples of these protocols are disclosed, e.g., in PCT Application No. WO 93/25240; Paganelli et al. (1991) Nucl. Med. Comm., 12: 211-234; Oehr et al. (1988) J. Nucl. Med., 29: 728-729; Kalofonos et al. (1990) J. Nucl. Med., 31: 1791-1796; Goodwin et al. (1988) J. Nucl. Med., 29: 226-234; and the like).

[0084] These applications of microorganism binding peptides of this invention are intended to be illustrative and not limiting. Using the teaching provided herein, other uses will be recognized by one of skill in the art.

[0085] B) Illustrative Novel Targeting Peptides.

[0086] In certain embodiments, the targeting moiety comprises one or more targeting peptides that bind particular bacteria, fungi, and/or yeasts, and/or algae, and/or viruses and/or that bind particular groups of bacteria, and/or groups of fungi, and/or groups of yeasts, and/or groups of algae.

[0087] In certain embodiments the targeting peptides include peptides comprising or consisting of one or more of the amino acid sequences shown in Table 3 (SEQ ID NOs:13-1566). In various embodiments the peptides include peptides comprising or consisting of the retro, inverso, retro-inverso, and/or beta form of one or more of the amino acid sequences shown in Table 3. Also contemplated are circular permutations of these sequences as well as peptides comprising or consisting of the retro, inverso, retro-inverso, and/or beta form of such circular permutations.

[0088] It will also be recognized, that in certain embodiments, any peptide or compound AMP described herein can be circularized.

[0089] In various embodiments the peptides can optionally bear one or more protecting groups, e.g., and the amino and/or carboxyl termini, and/or on side chains.

[0090] Also contemplated are peptides comprising one, two, three four, or five conservative substitutions of these amino acid sequences.

TABLE 3
Illustrative list of novel targeting peptides.

| | | | |
|---|---|---|---|
| | | | SEQ ID |
| ID | Target(s) | Targeting Peptide Sequence | NO |

| | | | |
|---|---|---|---|
| 1T-3 | S. mutans | VLGIAGGLDAYGELVGGN | 13 |
| | S. gordonii | | |
| 1T-4 | S. mutans | LDAYGELVGGN | 14 |
| | S. gordonii | | |
| | S. sanguinis | | |
| | S. oralis | | |
| | V. atypica | | |
| | L. casei | | |
| 1T-6 | S. mutans | KFINGVLSQFVLERK | 15 |
| 1T-7 | M. xanthus | SQRIIEPVKSPQPYPGFSVS | 16 |
| 1T-8 | M. xanthus | FSVAACGEQRAVTFVLLIEDLI | 17 |
| 1T-9 | M. xanthus | WAWAESPRCVSTRSNIHALAFRVEVAA | 18 |
| | | LT | |
| 1T-10 | M. xanthus | SPAGLPGDGDEA | 19 |
| 1T-11 | S. mutans | RISE | 20 |
| | S. epidermidis | | |
| | P. aeruginosa | | |
| 1T-12 | C. xerosis | FGNIFKGLKDVIETIVKWTAAK | 21 |
| | C. striatum | | |
| | S. epidermidis | | |
| | S. mutans | | |
| 1T-13 | S. aureus | FRSPCINNNSLQPPGVYPAR | 22 |
| | S. epidermidis | | |
| | P. aeruginosa | | |
| 1T-14 | S. mutans | ALAGLAGLISGK | 23 |
| | S. aureus | | |
| | S. epidermidis | | |
| | C. xerosis | | |
| 1T-15 | S. mutans | DVILRVEAQ | 24 |
| 1T-16 | P. aeruginosa | IDMR | 25 |
| 1T-17 | S. mutans | NNAIVYIS | 26 |
| 1T-18 | S. aureus | YSKTLHFAD | 27 |
| | S. epidermidis | | |
| | C. striatum | | |
| | P. aeruginosa | | |
| 1T-19 | S. aureus | PGAFRNPQMPRG | 28 |
| | S. epidermidis | | |
| | P. aeruginosa | | |
| 1T-20 | S. mutans | PALVDLSNKEAVWAVLDDHS | 29 |
| | P. aeruginosa | | |
| 1T-21 | S. mutans | YVEEAVRAALKKEARISTEDTPVNLPSF | 30 |
| | P. aeruginosa | DC | |
| 1T-22 | S. epidermidis | VPLDDGTRRPEVARNRDKDRED | 31 |
| | P. aeruginosa | | |
| 1T-23 | S. mutans | PALVDLSNKEAVWAVLDDHS | 32 |
| | P. aeruginosa | | |
| 1T-24 | P. aeruginosa | EEAEEKLAEVSQAVKRLVR | 33 |
| 1T-25 | S. aureus | VGLDVSVLVLFFGLQLLSVLLGAMIR | 34 |
| | S. epidermidis | | |
| | C. xerosis | | |
| | C. striatum | | |
| | P. aeruginosa | | |
| 1T-26 | S. mutans | LTILPTTFFAIIVPILAVAFIAYSGFKIKGI | 35 |
| | S. aureus | VEHKDQW | |
| | S. epidermidis | | |
| | C. jeikeium | | |
| | C. xerosis | | |
| | C. striatum | | |
| | P. aeruginosa | | |
| 1T-27 | S. mutans | ALFVSLEQFLVVVAKSVFALCHSGTLS | 36 |
| | S. aureus | | |
| | S. epidermidis | | |
| | C. jeikeium | | |
| | C. xerosis | | |
| | C. striatum | | |
| | P. aeruginosa | | |
| 1T-28 | P. aeruginosa | VSRDEAMEFIDREWTTLQPAGKSHA | 37 |
| 1T-29 | S. mutans | GSVIKKRRKRMSKKKHRKMLRRTRVQ | 38 |
| | S. aureus | RRKLGK | |
| | S. epidermidis | | |
| | C. jeikeium | | |
| | C. xerosis | | |
| | C. striatum | | |
| | P. aeruginosa | | |
| 1T-30 | S. aureus | GKAKPYQVRQVLRAVDKLETRRKKGGR | 39 |
| | S. epidermidis | | |
| | C. xerosis | | |
| | C. striatum | | |
| | P. aeruginosa | | |
| 1T-31 | S. mutans | NATGTDIGEVTLTLGRFS | 40 |
| | P. aeruginosa | | |
| 1T-32 | S. mutans | VSFLAGWLCLGLAAWRLGNA | 41 |
| 1T-33 | S. aureus | VRTLTILVIFIFNYLKSISYKLKQPFENNL | 42 |
| | S. epidermidis | AQSMISI | |
| | C. jeikeium | | |
| | C. xerosis | | |
| | C. striatum | | |
| | P. aeruginosa | | |
| 1T-34 | S. aureus | AFWLNILLTLLGYIPGIVHAVYIIAKR | 43 |
| | S. epidermidis | | |
| | C. jeikeium | | |
| | C. xerosis | | |
| | C. striatum | | |
| | P. aeruginosa | | |
| 1T-35 | P. aeruginosa | EICLTLVFPIRGSYSEAAKFPVPIHIVEDG | 44 |
| | | TVELPK | |
| 1T-36 | S. aureus | VYRHLRFIDGKLVEIRLERK | 45 |
| | S. epidermidis | | |
| | C. jeikeium | | |
| | C. xerosis | | |
| | C. striatum | | |
| | P. aeruginosa | | |
| 1T-37 | S. mutans | YIVGALVILAVAGLIYSMLRKA | 46 |
| | S. aereus | | |
| | S. epidermidis | | |
| | C. jeikeium | | |
| | C. xerosis | | |
| | C. striatum | | |
| | P. aeruginosa | | |
| 1T-38 | S. mutans | VMFVLTRGRSPRPMIPAY | 47 |
| | S. aereus | | |
| | S. epidermidis | | |
| | C. jeikeium | | |
| | C. xerosis | | |
| | C. striatum | | |
| | P. aeruginosa | | |
| 1T-39 | S. mutans | FGFCVWMYQLLAGPPGPPA | 48 |
| | P. aeruginosa | | |
| 1T-40 | S. mutans | QRVSLWSEVEHEFR | 49 |
| | P. aeruginosa | | |
| 1T-41 | S. mutans | KRGSKIVIAIAVVLIVLAGVWVW | 50 |
| | S. aureus | | |
| | S. epidermidis | | |
| | C. jeikeium | | |
| | C. striatum | | |
| | P. aeruginosa | | |
| 1T-42 | S. aureus | TVLDWLSLALATGLFVYLLVALLRADRA | 51 |
| | S. epidermidis | | |
| | C. xerosis | | |
| | C. striatum | | |
| | P. aeruginosa | | |
| 1T-43 | C. jeikium | DRCLSVLSWSPPKVSPLI | 52 |
| | P. aeruginosa | | |
| 1T-44 | S. mutans | DPALADFAAGMRAQVRT | 53 |
| | S. aureus | | |
| | S. epidermidis | | |
| | C. jeikeium | | |
| | C. striatum | | |
| | P. aeruginosa | | |
| 1T-45 | S. aureus | WTKPSFTDLRLGFEVTLYFANR | 54 |
| | S. epidermidis | | |
| | C. striatum | | |
| | P. aeruginosa | | |
| 1T-46 | S. aureus | FSFKQRVMFRKEVERLR | 55 |
| | S. epidermidis | | |
| | C. jeikeium | | |
| | C. xerosis | | |
| | C. striatum | | |
| | P. aeruginosa | | |
| 1T-47 | S. mutans | VIKISVPGQVQMLIP | 56 |
| | S. epidermidis | | |
| | P. aeruginosa | | |
| 1T-48 | S. aureus | KLQVHHGRATHTLLLQPPLCAPGTIR | 57 |
| | S. epidermidis | | |
| | C. jeikeium | | |
| | C. xerosis | | |
| | C. striatum | | |
| | P. aeruginosa | | |
| 1T-49 | S. aureus | SLVRIHDQQPWVTRGAFIDAARTCS | 58 |
| | S. epidermidis | | |
| | C. jeikeium | | |
| | P. aeruginosa | | |
| 1T-50 | P. aeruginosa | HSDEPIPNILFKSDSVH | 59 |
| 1T-51 | S. aureus | GKPKRMPAEFIDGYGQALLAGA | 60 |
| | P. aeruginosa | | |
| 1T-52 | S. aureus | DEYPAKLPLSDKGATEPRRH | 61 |
| | C. xerosis | | |
| | P. aeruginosa | | |
| 1T-53 | P. aeruginosa | SDILAEMFEKGELQTLVKDAAAKANA | 62 |
| 1T-54 | S. epidermidis | RWVSCNPSWRIQ | 63 |
| | C. xerosis | | |
| | C. striatum | | |
| | P. aeruginosa | | |
| 1T-55 | C. xerosis | NHKTLKEWKAKWGPEAVESWATLLG | 64 |
| | P. aeruginosa | | |
| 1T-56 | C. xerosis | LALIGAGIWMIRKG | 65 |
| | P. aeruginosa | | |
| 1T-57 | P. aeruginosa | RLEYRRLETQVEENPESGRRPMRG | 66 |
| 1T-58 | P. aeruginosa | CDDLHALERAGKLDALLSA | 67 |
| 1T-59 | S. aureus | AVGNNLGKDNDSGHRGKKHRKHKHR | 68 |
| | S. epidermidis | | |
| | P. aeruginosa | | |
| 1T-60 | S. aureus | YLTSLGLDAAEQAQGLLTILKG | 69 |
| | S. epidermidis | | |
| | C. jeikeium | | |
| | C. striatum | | |
| | P. aeruginosa | | |
| 1T-61 | P. aeruginosa | HATLLPAVREAISRQLLPALVPRG | 70 |
| 1T-62 | S. epidermidis | GCKGCAQRDPCAEPEPYFRLR | 71 |
| | P. aeruginosa | | |
| 1T-63 | S. aureus | EPLILKELVRNLFLFCYARALR | 72 |
| | S. epidermidis | | |
| | C. jeikeium | | |
| | C. xerosis | | |
| | C. striatum | | |
| | P. aeruginosa | | |
| 1T-64 | S. aureus | QTVHHIHMHVLGQRQMHWPPG | 73 |
| | S. epidermidis | | |
| | C. jeikeium | | |
| | C. xerosis | | |
| | C. striatum | | |
| | P. aeruginosa | | |
| 1T-65 | S. mutans | HARAAVGVAELPRGAAVEVELIAAVRP | 74 |
| | S. aureus | | |
| | S. epidermidis | | |
| | C. jeikeium | | |
| | C. xerosis | | |
| | C. striatum | | |
| | P. aeruginosa | | |
| 1T-66 | S. mutans | DTDCLSRAYAQRIDELDKQYAGIDKPL | 75 |
| | S. aureus | | |
| | S. epidermidis | | |
| | C. jeikeium | | |
| | C. xerosis | | |
| | C. striatum | | |
| | P. aeruginosa | | |
| 1T-67 | S. aureus | GQRQRLTCGRVSGCSEGPSREAAR | 76 |
| | S. epidermidis | | |
| | C. jeikeium | | |
| | C. xerosis | | |
| | C. striatum | | |
| | P. aeruginosa | | |
| 1T-68 | S. mutans | GGTKEIVYQRG | 77 |
| | S. aureus | | |
| | C. jeikeium | | |
| | C. xerosis | | |
| | C. striatum | | |
| | P. aeruginosa | | |
| 1T-69 | S. mutans | ILSQEADRKKLF | 78 |
| | P. aeruginosa | | |
| 1T-70 | S. aureus | NRQAQGERAHGEQQG | 79 |
| | C. jeikeium | | |
| | P. aeruginosa | | |
| 1T-71 | P. aeruginosa | KIDTNQWPPNKEG | 80 |
| 1T-72 | P. aeruginosa | EPTDGVACKER | 81 |
| 1T-73 | S. pneumoniae | GWWEELLHETILSKFKITKALELPIQL | 82 |
| 1T-74 | S. pneumoniae | DIDWGRKISCAAGVAYGAIDGCATTV | 83 |
| 1T-75 | S. pneumoniae | GVARGLQLGIKTRTQWGAATGAA | 84 |
| 1T-76 | S. pneumoniae | EMRLSKFFRDFILWRKK | 85 |
| 1T-77 | S. pneumoniae | EMRISRIILDFLFLRKK | 86 |
| 1T-78 | S. pneumoniae | FFKTIFVLILGALGVAAGLYIEKNYIDK | 87 |
| 1T-79 | S. pneumoniae | FGTPWSITNFWKKNFNDRPDFDSDRRRY | 88 |
| 1T-80 | S. pneumoniae | GGNLGPGFGVIIP | 89 |
| 1T-81 | S. pneumoniae | AIATGLDIVDGKFDGYLWA | 90 |
| 1T-82 | S. pneumoniae | FGVGVGIALFMAGYAIGKDLRKKFGKSC | 91 |
| 1T-83 | S. pneumoniae | QKPRKNETFIGYIQRYDIDGNGYQSLPC | 92 |
| | | PQN | |
| 1T-84 | S. pneumoniae | FRKKRYGLSILLWLNAFTNLVNSIHAFY | 93 |
| | | MTLF | |
| 1T-85 | A. naeslundii | VMASLTWRMRAASASLPTHSRTDA | 94 |
| | F. nucleatum | | |
| | P. gingivalis | | |
| | S. epidermidis | | |
| | S. gordonii | | |
| | S. mitis | | |
| | S. mutans | | |
| | S. oralis | | |
| | S. salivarious | | |
| | S. sanguinis | | |
| 1T-86 | S. mitis | HRKNPVLGVGRRHRAHNVA | 95 |
| | S. oralis | | |
| | S. salivarious | | |
| 1T-87 | S. mitis | EAVGQDLVDAHHP | 96 |
| | S. mutans | | |
| | S. oralis | | |
| 1T-89 | S. mitis | HEDDKRRGMSVEVLGFEVVQHEE | 97 |
| | S. mutans | | |
| 1T-90 | S. gordonii | RNVIGQVL | 98 |
| | S. mitis | | |
| | S. mutans | | |
| | S. oralis | | |
| | S. sanguinis | | |
| 1T-91 | S. mitis | TSVRPGAAGAAVPAGAAGAAGAGWR | 99 |
| | S. mutans | WP | |
| | S. oralis | | |
| | S. sanguinis | | |
| 1T-92 | S. mitis | GQDEGQRRAGVGEGQGVDG | 100 |
| | S. mutans | | |
| 1T-93 | S. epidermidis | AMRSVNQA | 101 |
| | S. gordonii | | |
| | S. mitis | | |
| | S. mutans | | |
| | S. oralis | | |
| | S. sanguinis | | |
| 1T-94 | S. mitis | DQVAHSGDMLVQARRRDS | 102 |
| | S. mutans | | |
| | S. oralis | | |
| 1T-95 | S. gordonii | GHLLRVGGRVGGVGGVAGACAQPFGGQ | 103 |
| | S. mitis | | |
| | S. mutans | | |
| | S. oralis | | |
| | S. sanguinis | | |
| 1T-96 | S. gordonii | VAGACAQPFGGQ | 104 |
| | S. mitis | | |
| | S. mutans | | |
| | S. oralis | | |
| | S. sanguinis | | |
| 1T-97 | A. naeslundii | GVAERNLDRITVAVAIIWTITIVGLGLV | 105 |
| | F. nucleatum | AKLG | |
| | P. gingivalis | | |
| | S. epidermidis | | |
| | S. gordonii | | |
| | S. mitis | | |
| | S. mutans | | |
| | S. oralis | | |
| | S. salivarious | | |
| | S. sanguinis | | |
| 1T-98 | A. naeslundii | VRSAKAVKALTAAGYTGELVNVSGGM | 106 |
| | F. nucleatum | KAWLGQ | |
| | P. gingivalis | | |
| | S. epidermidis | | |
| | S. gordonii | | |
| | S. mitis | | |
| | S. mutans | | |
| | S. oralis | | |
| | S. salivarious | | |
| | S. sanguinis | | |
| 1T-99 | S. gordonii | MKAWLGQ | 107 |
| | S. mitis | | |
| | S. mutans | | |
| | S. oralis | | |
| | S. sanguinis | | |
| 1T-100 | S. gordonii | LDPLEPRIAPPGDRSHQGAPACHRDPLR | 108 |
| | S. mitis | GRSARDAER | |
| | S. mutans | | |
| 1T-101 | A. naeslundii | RLRVGRATDLPLTSFAVGVVRNLPDAP | 109 |
| | P. gingivalis | AH | |
| | S. epidermidis | | |
| | S. gordonii | | |
| | S. mitis | | |
| | S. mutans | | |
| | S. oralis | | |
| | S. sanguinis | | |
| 1T-102 | A. naeslundii | WKRLWPARILAGHSRRRMRWMVVWR | 110 |
| | F. nucleatum | YFAAT | |
| | P. gingivalis | | |
| | S. epidermidis | | |
| | S. gordonii | | |
| | S. mitis | | |
| | S. mutans | | |
| | S. oralis | | |
| | S. salivarious | | |
| | S. sanguinis | | |
| 1T-103 | A. naeslundii | AQFYEAIITGYALGAGQRIGQL | 111 |
| | F. nucleatum | | |
| | P. gingivalis | | |
| | S. epidermidis | | |
| | S. gordonii | | |
| | S. mitis | | |
| | S. mutans | | |
| | S. oralis | | |
| | S. sanguinis | | |
| 1T-104 | S. mitis | RAVAAHLQGRHHGHQVRRQRHGQR | 112 |
| 1T-105 | S. epidermidis | GEGLPPPVLHLPPPRMSGR | 113 |
| | S. gordonii | | |
| | S. mitis | | |
| | S. mutans | | |
| | S. oralis | | |
| 1T-106 | S. gordonii | DALRRSRSQGRRHR | 114 |
| | S. mitis | | |
| | S. mutans | | |
| | S. oralis | | |
| | S. salivarious | | |
| 1T-107 | A. naeslundii | SPVPRFTAVGGVSRGSP | 115 |
| | S. epidermidis | | |
| | S. gordonii | | |
| | S. mitis | | |
| | S. mutans | | |
| | S. oralis | | |
| | S. salivarious | | |
| | S. sanguinis | | |
| 1T-108 | S. gordonii | WGPLGPERPLW | 116 |
| | S. mitis | | |
| | S. mutans | | |
| | S. oralis | | |
| | S. salivarious | | |
| | S. sanguinis | | |
| 1T-109 | A. naeslundii | VTTNVRQGAGS | 117 |
| | S. epidermidis | | |
| | S. gordonii | | |
| | S. mitis | | |
| | S. mutans | | |
| | S. oralis | | |
| | S. salivarious | | |
| | S. sanguinis | | |
| 1T-110 | A. naeslundii | LAAKTAVCVGRAFM | 118 |
| | P. gingivalis | | |
| | S. epidermidis | | |
| | S. gordonii | | |
| | S. mitis | | |
| | S. mutans | | |
| | S. oralis | | |
| | S. sanguinis | | |
| 1T-111 | A. naeslundii | GRLSRREEDPATSIILLRGAYRMAVF | 119 |
| | F. nucleatum | | |
| | P. gingivalis | | |
| | S. epidermidis | | |
| | S. gordonii | | |
| | S. mitis | | |
| | S. mutans | | |
| | S. oralis | | |
| | S. salivarious | | |
| | S. sanguinis | | |
| 1T-112 | S. gordonii | SDNDGKLILGTSQ | 120 |
| 1T-113 | S. mitis | HGAHQRTGQRLHHHRGRTVSGCRQNP | 121 |
| | | VAGVDPDEHR | |
| 1T-114 | A. naeslundii | RQAPGPGLVTITAACSAPGSRSR | 122 |
| | P. gingivalis | | |
| | S. epidermidis | | |
| | S. gordonii | | |
| | S. mitis | | |
| | S. mutans | | |
| | S. oralis | | |
| | S. sanguinis | | |
| 1T-115 | A. naeslundii | LLIERFSNHH | 123 |
| | F. nucleatum | | |
| | P. gingivalis | | |
| | S. epidermidis | | |
| | S. gordonii | | |
| | S. mitis | | |
| | S. mutans | | |
| | S. oralis | | |
| | S. salivarious | | |
| | S. sanguinis | | |
| 1T-116 | A. naeslundii | MILHRRRDR | 124 |
| | P. gingivalis | | |
| | S. epidermidis | | |
| | S. gordonii | | |
| | S. mitis | | |
| | S. mutans | | |
| | S. oralis | | |
| | S. salivarious | | |
| | S. sanguinis | | |
| 1T-117 | S. mutans | GPGVVGPAPFSRLPAHALNL | 125 |
| 1T-118 | A. naeslundii | TASPPAPSDQGLRTAFPATLLIALAALA | 126 |
| | F. nucleatum | RISR | |
| | P. gingivalis | | |
| | S. epidermidis | | |
| | S. gordonii | | |
| | S. mitis | | |
| | S. mutans | | |
| | S. oralis | | |
| | S. salivarious | | |
| | S. sanguinis | | |
| 1T-119 | S. gordonii | SPATQKAPTRAQPSRAPVQDCGDGRPT | 127 |
| | S. mitis | AAPDDVERLSPR | |
| | S. mutans | | |
| | S. oralis | | |
| 1T-120 | A. naeslundii | DVRDRVDLAGADLCAAHATR | 128 |
| | F. nucleatum | | |
| | P. gingivalis | | |
| | S. epidermidis | | |
| | S. gordonii | | |
| | S. mitis | | |
| | S. mutans | | |
| | S. oralis | | |
| | S. salivarious | | |
| | S. sanguinis | | |
| 1T-121 | S. gordonii | FAKETGFGIGGAQEGWWIIADIYGPNPF | 129 |
| | S. mitis | | |
| | S. mutans | | |
| | S. oralis | | |
| | S. salivarious | | |
| | S. sanguinis | | |
| 1T-122 | S. mitis | GAIPDPVTHRVDWEEDHQTRPSR | 130 |
| 1T-123 | S. gordonii | LVRRNAVAGRSDGLAGAEQLDLVRLQ | 131 |
| | | GVL | |
| 1T-124 | S. mitis | LFDERNKIA | 132 |
| | S. mutans | | |
| | S. oralis | | |
| 1T-125 | S. epidermidis | DAITGGNPPLSDTDGLRP | 133 |
| | S. gordonii | | |
| | S. mutans | | |
| | S. oralis | | |
| 1T-126 | S. gordonii | QGLARPVLRRIPL | 134 |
| | S. mitis | | |
| | S. mutans | | |
| 1T-127 | A. naeslundii | YDPVPKRKNKNSEGKREE | 135 |
| | F. nucleatum | | |
| | P. gingivalis | | |
| | T. denticola | | |
| | S. gordonii | | |
| | S. mitis | | |
| | S. mutans | | |
| | S. oralis | | |
| | S. salivarious | | |
| | S. sanguinis | | |
| 1T-128 | A. naeslundii | SGSAIRMLEIATKMLKR | 136 |
| | P. gingivalis | | |
| | S. epidermidis | | |
| | S. gordonii | | |
| | S. mitis | | |
| | S. mutans | | |
| | S. oralis | | |
| | S. salivarious | | |
| | S. sanguinis | | |
| 1T-129 | A. naeslundii | YDKYIKYLSIQPPFIVYFI | 137 |
| | P. gingivalis | | |
| | S. epidermidis | | |
| | S. gordonii | | |
| | S. mitis | | |
| | S. mutans | | |
| | S. oralis | | |
| | S. salivarious | | |
| | S. sanguinis | | |
| 1T-130 | A. naeslundii | QKIIDMSKFLFSLILFIMIVVIYIGKSIGG | 138 |
| | F. nucleatum | YSAIVSSIMLELDTVLYNKKIFFIYK | |
| | P. gingivalis | | |
| | S. epidermidis | | |
| | S. gordonii | | |
| | S. mitis | | |
| | S. mutans | | |
| | S. oralis | | |
| | S. salivarious | | |
| | S. sanguinis | | |
| 1T-131 | A. naeslundii | DEVWKMLGI | 139 |
| | F. nucleatum | | |
| | P. gingivalis | | |
| | T. denticola | | |
| | S. gordonii | | |
| | S. mitis | | |
| | S. mutans | | |
| | S. oralis | | |
| | S. salivarious | | |
| | S. sanguinis | | |
| 1T-132 | A. naeslundii | YSKKLFEYFYFIIFILIRYLIFYKIIQNKNY | 140 |
| | F. nucleatum | YINNIAYN | |
| | P. gingivalis | | |
| | S. epidermidis | | |
| | S. gordonii | | |
| | S. mitis | | |
| | S. mutans | | |
| | S. oralis | | |
| | S. salivarious | | |
| | S. sanguinis | | |
| 1T-133 | A. naeslundii | YFIKDDNEALSKDWEVIGNDLKGTIDK | 141 |
| | P. gingivalis | YGKEFKVR | |
| | S. epidermidis | | |
| | S. gordonii | | |
| | S. mitis | | |
| | S. mutans | | |
| | S. oralis | | |
| | S. salivarious | | |
| | S. sanguinis | | |
| 1T-134 | A. naeslundii | SRLVREIKKKCRKS | 142 |
| | F. nucleatum | | |
| | P. gingivalis | | |
| | S. epidermidis | | |
| | S. gordonii | | |
| | S. mitis | | |
| | S. mutans | | |
| | S. oralis | | |
| | S. salivarious | | |
| | S. sanguinis | | |
| 1T-135 | A. naeslundii | FESLLPQATKKIVNNKGSKINKIF | 143 |
| | P. gingivalis | | |
| | S. epidermidis | | |
| | S. gordonii | | |
| | S. mitis | | |
| | S. mutans | | |
| | S. oralis | | |
| | S. salivarious | | |
| | S. sanguinis | | |
| 1T-136 | A. naeslundii | ELLTQIRLALLYSVNEW | 144 |
| | F. nucleatum | | |
| | P. gingivalis | | |
| | S. epidermidis | | |
| | S. gordonii | | |
| | S. mitis | | |
| | S. mutans | | |
| | S. oralis | | |
| | S. salivarious | | |
| | S. sanguinis | | |
| 1T-137 | A. naeslundii | PLNFYRAVKENRLPLSEKNINDFTNIKL | 145 |
| | F. nucleatum | KVSPKLINLLQESSIFYNFSPKKRNTN | |
| | P. gingivalis | | |
| | S. epidermidis | | |
| | S. gordonii | | |
| | S. mitis | | |
| | S. mutans | | |
| | S. oralis | | |
| | S. salivarious | | |
| | S. sanguinis | | |
| 1T-138 | A. naeslundii | YPNEYCIFLENLSLEELKEIKAINGETLN | 146 |
| | F. nucleatum | LEEIINERKNLKD | |
| | P. gingivalis | | |
| | S. epidermidis | | |
| | S. gordonii | | |
| | S. mitis | | |
| | S. mutans | | |
| | S. oralis | | |
| | S. salivarious | | |
| | S. sanguinis | | |
| 1T-139 | A. naeslundii | AVAGAAVGALLGNDARSTAVGAAIGG | 147 |
| | S. gordonii | ALGAGAGELTKNK | |
| | S. mitis | | |
| | S. mutans | | |
| | S. oralis | | |
| 1T-140 | A. naeslundii | IKGTIAFVGEDYVEIRVDKGVKLTFRKS | 148 |
| | F. nucleatum | AIANVINNNQQ | |
| | P. gingivalis | | |
| | S. epidermidis | | |
| | S. gordonii | | |
| | S. mitis | | |
| | S. mutans | | |
| | S. oralis | | |
| | S. salivarious | | |
| | S. sanguinis | | |
| 1T-141 | F. nucleatum | KKFIILLFILVQGLIFSATKTLSDIIAL | 149 |
| | P. gingivalis | | |
| | S. epidermidis | | |
| | S. gordonii | | |
| | S. mitis | | |
| | S. mutans | | |
| | S. oralis | | |
| | S. sanguinis | | |
| 1T-142 | A. naeslundii | FTQGIKRIVLKRLKED | 150 |
| | F. nucleatum | | |
| | P. gingivalis | | |
| | T. denticola | | |
| | S. gordonii | | |
| | S. mitis | | |
| | S. mutans | | |
| | S. oralis | | |
| | S. salivarious | | |
| | S. sanguinis | | |
| 1T-143 | A. naeslundii | MPKRHYYKLEAKALQFGLPFAYSPIQL | 151 |
| | F. nucleatum | LK | |
| | P. gingivalis | | |
| | S. epidermidis | | |
| | S. gordonii | | |
| | S. mitis | | |
| | S. mutans | | |
| | S. oralis | | |
| | S. salivarious | | |
| | S. sanguinis | | |
| 1T-144 | A. naeslundii | IIELHPKSWTQDWRCSFL | 152 |
| | F. nucleatum | | |
| | P. gingivalis | | |
| | T. denticola | | |
| | S. gordonii | | |
| | S. mitis | | |
| | S. mutans | | |
| | S. oralis | | |
| | S. salivarious | | |
| | S. sanguinis | | |
| 1T-145 | S. mitis | VEAGKRNISLENIEKISKGLGISISELFKY | 153 |
| | S. mutans | IEEGEDKIG | |
| | S. oralis | | |
| 1T-146 | A. naeslundii | RNSADNQTKIDKIRIDISLWDEHLNIVK | 154 |
| | F. nucleatum | QGK | |
| | P. gingivalis | | |
| | T. denticola | | |
| | S. gordonii | | |
| | S. mitis | | |
| | S. mutans | | |
| | S. oralis | | |
| | S. salivarious | | |
| | S. sanguinis | | |
| 1T-147 | A. naeslundii | GVENRRFYERDVSKVSMMTSEAVAPR | 155 |
| | F. nucleatum | GGSK | |
| | P. gingivalis | | |
| | T. denticola | | |
| | S. gordonii | | |
| | S. mitis | | |
| | S. mutans | | |
| | S. oralis | | |
| | S. salivarious | | |
| | S. sanguinis | | |
| 1T-148 | A. naeslundii | IVELDDTTILERALSMLGEANA | 156 |
| | F. nucleatum | | |
| | P. gingivalis | | |
| | T. denticola | | |
| | S. gordonii | | |
| | S. mitis | | |
| | S. mutans | | |
| | S. oralis | | |
| | S. salivarious | | |
| | S. sanguinis | | |
| 1T-149 | A. naeslundii | SVRAVKPIDETVARHFPGDFIVN | 157 |
| | F. nucleatum | | |
| | P. gingivalis | | |
| | T. denticola | | |
| | S. gordonii | | |
| | S. mitis | | |
| | S. mutans | | |
| | S. oralis | | |
| | S. salivarious | | |
| | S. sanguinis | | |
| 1T-150 | A. naeslundii | YINRRLKKAFSDADIKEAPAEFYEELRR | 158 |
| | F. nucleatum | VQYV | |
| | P. gingivalis | | |
| | T. denticola | | |
| | S. gordonii | | |
| | S. mitis | | |
| | S. mutans | | |
| | S. oralis | | |
| | S. salivarious | | |
| | S. sanguinis | | |
| 1T-151 | A. naeslundii | SVRAVKPIDEIVAWHFPGDFIVN | 159 |
| | F. nucleatum | | |
| | P. gingivalis | | |
| | T. denticola | | |
| | S. gordonii | | |
| | S. mitis | | |
| | S. mutans | | |
| | S. oralis | | |
| | S. salivarious | | |
| | S. sanguinis | | |
| 1T-152 | A. naeslundii | YVSADESAYNHIVTDDIPLADRRIEAVQQ | 160 |
| | F. nucleatum | | |
| | P. gingivalis | | |
| | S. epidermidis | | |
| | S. gordonii | | |
| | S. mitis | | |
| | S. mutans | | |
| | S. oralis | | |
| | S. salivarious | | |
| | S. sanguinis | | |
| 1T-153 | A. naeslundii | YIACPGYFY | 161 |
| | F. nucleatum | | |
| | P. gingivalis | | |
| | S. epidermidis | | |
| | S. gordonii | | |
| | S. mitis | | |
| | S. mutans | | |
| | S. oralis | | |
| | S. salivarious | | |
| | S. sanguinis | | |
| 1T-154 | P. gingivalis | YFSFLEIVGMARR | 162 |
| 1T-155 | A. naeslundii | LKLAFGVYPFQAMSQSDTAVSERNVL | 163 |
| | F. nucleatum | WR | |
| | P. gingivalis | | |
| | S. epidermidis | | |
| | S. gordonii | | |
| | S. mitis | | |
| | S. mutans | | |
| | S. oralis | | |
| | S. salivarious | | |
| | S. sanguinis | | |
| 1T-156 | A. naeslundii | GRFQISIRGEEKSKVKVQGKGTFTDRNTT | 164 |
| | F. nucleatum | | |
| | P. gingivalis | | |
| | T. denticola | | |
| | S. gordonii | | |
| | S. mitis | | |
| | S. mutans | | |
| | S. oralis | | |
| | S. salivarious | | |
| | S. sanguinis | | |
| 1T-157 | A. naeslundii | RRFRKTTENREKSKNKKAVLGLSTTST | 165 |
| | F. nucleatum | ASY | |
| | P. gingivalis | | |
| | T. denticola | | |
| | S. gordonii | | |
| | S. mitis | | |
| | S. mutans | | |
| | S. oralis | | |
| | S. salivarious | | |
| | S. sanguinis | | |
| 1T-158 | A. naeslundii | WENKPSPLGSIKKLQGLVYRLIGYRHF | 166 |
| | F. nucleatum | WV | |
| | P. gingivalis | | |
| | S. epidermidis | | |
| | S. gordonii | | |
| | S. mitis | | |
| | S. mutans | | |
| | S. oralis | | |
| | S. salivarious | | |
| | S. sanguinis | | |
| 1T-159 | P. gingivalis | IFSLHHFALICSEMGTFAVSKRAKYKWE | 167 |
| | | VL | |
| 1T-160 | A. naeslundii | AQYKYINKLLN | 168 |
| | F. nucleatum | | |
| | P. gingivalis | | |
| | T. denticola | | |
| | S. gordonii | | |
| | S. mitis | | |
| | S. mutans | | |
| | S. oralis | | |
| | S. salivarious | | |
| | S. sanguinis | | |
| 1T-161 | A. naeslundii | NKVLQVEVMWDGSVVGRPAGVISIKSS | 169 |
| | F. nucleatum | KKG | |
| | P. gingivalis | | |
| | S. epidermidis | | |
| | S. gordonii | | |
| | S. mitis | | |
| | S. mutans | | |
| | S. oralis | | |
| | S. salivarious | | |
| | S. sanguinis | | |
| 1T-162 | A. naeslundii | QKAKEESDRKAAVSYNGFHRVNVVSIPK | 170 |
| | F. nucleatum | | |
| | P. gingivalis | | |
| | T. denticola | | |
| | S. gordonii | | |
| | S. mitis | | |
| | S. mutans | | |
| | S. oralis | | |
| | S. salivarious | | |
| | S. sanguinis | | |
| 1T-163 | A. naeslundii | MENILIYIPMVLSPFGSGILLFLGKDRRY | 171 |
| | F. nucleatum | ML | |
| | P. gingivalis | | |
| | S. epidermidis | | |
| | S. gordonii | | |
| | S. mitis | | |
| | S. mutans | | |
| | S. oralis | | |
| | S. salivarious | | |
| | S. sanguinis | | |
| 1T-164 | A. naeslundii | KKSHSQGKRKLKDLNSAYKIDNQLHYA | 172 |
| | F. nucleatum | LR | |
| | P. gingivalis | | |
| | S. epidermidis | | |
| | S. gordonii | | |
| | S. mitis | | |
| | S. mutans | | |
| | S. oralis | | |
| | S. salivarious | | |
| | S. sanguinis | | |
| 1T-165 | A. naeslundii | CYDSFDFSIFVTFANRMKLSVGS | 173 |
| | F. nucleatum | | |
| | P. gingivalis | | |
| | S. epidermidis | | |
| | S. gordonii | | |
| | S. mitis | | |
| | S. mutans | | |
| | S. oralis | | |
| | S. salivarious | | |
| | S. sanguinis | | |
| 1T-166 | A. naeslundii | AQSAGQIKRKSKVRIHV | 174 |
| | F. nucleatum | | |
| | P. gingivalis | | |
| | S. epidermidis | | |
| | S. gordonii | | |
| | S. mitis | | |
| | S. mutans | | |
| | S. oralis | | |
| | S. salivarious | | |
| | S. sanguinis | | |
| 1T-167 | A. naeslundii | SRMSEHSPAGLVFEVGPMDKGSFIILDS | 175 |
| | F. nucleatum | YHPTVKK | |
| | P. gingivalis | | |
| | S. epidermidis | | |
| | S. gordonii | | |
| | S. mitis | | |
| | S. mutans | | |
| | S. oralis | | |
| | S. salivarious | | |
| | S. sanguinis | | |
| 1T-168 | A. naeslundii | ELHRIMSTEKIGAVTKMNFDTAPIMSILP | 176 |
| | F. nucleatum | IDIYPKEVGIGS | |
| | P. gingivalis | | |
| | S. epidermidis | | |
| | S. gordonii | | |
| | S. mitis | | |
| | S. mutans | | |
| | S. oralis | | |
| | S. salivarious | | |
| | S. sanguinis | | |
| 1T-169 | A. naeslundii | FARVRRLHQNRILTQPLTNLKYCLRQPI | 177 |
| | F. nucleatum | YSD | |
| | P. gingivalis | | |
| | S. epidermidis | | |
| | S. gordonii | | |
| | S. mitis | | |
| | S. mutans | | |
| | S. oralis | | |
| | S. salivarious | | |
| | S. sanguinis | | |
| 1T-170 | P. gingivalis | AYGKVFSMDIMLSENDKLIVLRISHHSA | 178 |
| | | WH | |
| 1T-171 | A. naeslundii | SVRAVKPIDKTVARHFPGDFIVN | 179 |
| | F. nucleatum | | |
| | P. gingivalis | | |
| | S. epidermidis | | |
| | S. gordonii | | |
| | S. mitis | | |
| | S. mutans | | |
| | S. oralis | | |
| | S. salivarious | | |
| | S. sanguinis | | |
| 1T-172 | A. naeslundii | FEGLKNLLGDDII | 180 |
| | F. nucleatum | | |
| | P. gingivalis | | |
| | S. epidermidis | | |
| | S. gordonii | | |
| | S. mitis | | |
| | S. mutans | | |
| | S. oralis | | |
| | S. salivarious | | |
| | S. sanguinis | | |
| 1T-173 | A. naeslundii | LFRKEDQEHVLL | 181 |
| | F. nucleatum | | |
| | P. gingivalis | | |
| | S. gordonii | | |
| | S. mitis | | |
| | S. mutans | | |
| | S. oralis | | |
| | S. salivarious | | |
| | S. sanguinis | | |
| 1T-174 | A. naeslundii | SGGSDTDGSSSGEPGSHSGDL | 182 |
| | F. nucleatum | | |
| | P. gingivalis | | |
| | T. denticola | | |
| | S. gordonii | | |
| | S. mitis | | |
| | S. mutans | | |
| | S. oralis | | |
| | S. salivarious | | |
| | S. sanguinis | | |
| 1T-175 | A. naeslundii | GEPGSHSGDL | 183 |
| | F. nucleatum | | |
| | P. gingivalis | | |
| | S. epidermidis | | |
| | S. gordonii | | |
| | S. mitis | | |
| | S. mutans | | |
| | S. oralis | | |
| | S. salivarious | | |
| | S. sanguinis | | |
| 1T-176 | A. naeslundii | PVGDIMSGFLRGANQPRFLLDHISFGS | 184 |
| | P. gingivalis | | |
| | S. epidermidis | | |
| | S. gordonii | | |
| | S. mitis | | |
| | S. mutans | | |
| | S. oralis | | |
| | S. salivarious | | |
| | S. sanguinis | | |
| 1T-177 | P. gingivalis | GTNVPTQILGYSREERFDYEPAPEQR | 185 |
| | S. gordonii | | |
| | S. mitis | | |
| | S. mutans | | |
| | S. oralis | | |
| | S. salivarious | | |
| | S. sanguinis | | |
| 1T-178 | A. naeslundii | LLASHPERLSLGVFFVYRVLHLLLENT | 186 |
| | F. nucleatum | | |
| | P. gingivalis | | |
| | S. epidermidis | | |
| | S. gordonii | | |
| | S. mitis | | |
| | S. mutans | | |
| | S. oralis | | |
| | S. salivarious | | |
| | S. sanguinis | | |
| 1T-179 | A. naeslundii | TCYPLIQRKTDRAYEA | 187 |
| | F. nucleatum | | |
| | P. gingivalis | | |
| | T. denticola | | |
| | S. gordonii | | |
| | S. mitis | | |
| | S. mutans | | |
| | S. oralis | | |
| | S. salivarious | | |
| | S. sanguinis | | |
| 1T-180 | A. naeslundii | VVFGGGDRLV | 188 |
| | F. nucleatum | | |
| | P. gingivalis | | |
| | T. denticola | | |
| | S. gordonii | | |
| | S. mitis | | |
| | S. mutans | | |
| | S. oralis | | |
| | S. salivarious | | |
| | S. sanguinis | | |
| 1T-181 | A. naeslundii | YGKESDP | 189 |
| | F. nucleatum | | |
| | P. gingivalis | | |
| | T. denticola | | |
| | S. gordonii | | |
| | S. mitis | | |
| | S. mutans | | |
| | S. oralis | | |
| | S. salivarious | | |
| | S. sanguinis | | |
| 1T-182 | A. naeslundii | LTASICRQWNDNSTPYQR | 190 |
| | F. nucleatum | | |
| | P. gingivalis | | |
| | T. denticola | | |
| | S. gordonii | | |
| | S. mitis | | |
| | S. mutans | | |
| | S. oralis | | |
| | S. salivarious | | |
| | S. sanguinis | | |
| 1T-183 | A. naeslundii | PLRSFVAEKAEHAFRVVRIADFDFGHS | 191 |
| | F. nucleatum | | |
| | P. gingivalis | | |
| | S. epidermidis | | |
| | S. gordonii | | |
| | S. mitis | | |
| | S. mutans | | |
| | S. oralis | | |
| | S. salivarious | | |
| | S. sanguinis | | |
| 1T-184 | A. naeslundii | ALLVLNLLLMQFFFGKNM | 192 |
| | F. nucleatum | | |
| | P. gingivalis | | |
| | T. denticola | | |
| | S. gordonii | | |
| | S. mitis | | |
| | S. mutans | | |
| | S. oralis | | |
| | S. salivarious | | |
| | S. sanguinis | | |
| 1T-185 | A. naeslundii | HYHFLLEFGFHKGDYLE | 193 |
| | F. nucleatum | | |
| | P. gingivalis | | |
| | T. denticola | | |
| | S. gordonii | | |
| | S. mitis | | |
| | S. mutans | | |
| | S. oralis | | |
| | S. salivarious | | |
| | S. sanguinis | | |
| 1T-188 | S. sanguinis | HRKDVYKK | 194 |
| 1T-190 | A. naeslundii | IQIIVNAFVEKDKTGAVIEVLYASNNHE | 195 |
| | F. nucleatum | KVKAKYEELVAIS | |
| | P. gingivalis | | |
| | S. epidermidis | | |
| | S. gordonii | | |
| | S. mitis | | |
| | S. mutans | | |
| | S. oralis | | |
| | S. salivarious | | |
| | S. sanguinis | | |
| 1T-192 | S. sanguinis | ILVLLALQVELDSKFQY | 196 |
| 1T-193 | S. sanguinis | LMIFDKHANLKYKYGNRSFGVEAIM | 197 |
| 1T-195 | S. mutans | AASGFTYCASNGVWHPY | 198 |
| 1T-196 | F. nucleatum | KPEKEKLDTNTLMKVVNKALSLFDRLL | 199 |
| | S. sanguinis | IKFGA | |
| 1T-197 | A. naeslundii | TEILNFLITVCADRENWKIKHGLSDSVL | 200 |
| | F. nucleatum | LIFFARFTGAEYW | |
| | P. gingivalis | | |
| | S. epidermidis | | |
| | S. gordonii | | |
| | S. mitis | | |
| | S. mutans | | |
| | S. oralis | | |
| | S. salivarious | | |
| | S. sanguinis | | |
| 1T-198 | P. gingivalis | MPVSKKRYMLSSAYATALGICYGQVAT | 201 |
| | S. epidermidis | DEKESEITAIPDLLDYLSVEEYLL | |
| | S. gordonii | | |
| | S. mitis | | |
| | S. mutans | | |
| | S. oralis | | |
| | S. sanguinis | | |
| 1T-199 | S. sanguinis | RAGRIKKLSQKEAEPFEN | 202 |
| 1T-200 | A. naeslundii | MRFKRFDRDYALSGDNVFEVLTASCDV | 203 |
| | F. nucleatum | IERNLSYREMCGLMQ | |
| | S. epidermidis | | |
| | S. gordonii | | |
| | S. mitis | | |
| | S. mutans | | |
| | S. oralis | | |
| | S. salivarious | | |
| | S. sanguinis | | |
| 1T-201 | S. sanguinis | KRKHENVIVAEEMRVIKN | 204 |
| 1T-202 | A. naeslundii | LCRLEKLCKQFLRQDKVVTYYLMLPYK | 205 |
| | F. nucleatum | RAIEAFYQELKERS | |
| | P. gingivalis | | |
| | S. epidermidis | | |
| | S. gordonii | | |
| | S. mitis | | |
| | S. mutans | | |
| | S. oralis | | |
| | S. salivarious | | |
| | S. sanguinis | | |
| 1T-203 | A. naeslundii | YPFCLATVDHLPEGLSVTDYERVQRLV | 206 |
| | F. nucleatum | SQFLLNKEER | |
| | P. gingivalis | | |
| | S. epidermidis | | |
| | S. gordonii | | |
| | S. mitis | | |
| | S. mutans | | |
| | S. oralis | | |
| | S. salivarious | | |
| | S. sanguinis | | |
| 1T-207 | F. nucleatum | SPLEKYGTGSMTALTFLLGCCLLVLSKK | 207 |
| | S. sanguinis | SR | |
| 1T-208 | Unanalyzed | KRKRWAILTLFLAGLGAVGIVLATF | 208 |
| 1T-215 | S. sanguinis | VCFKDISVFLSPFRGQEVLFCGKAKHSL | 209 |
| | | IYVIGT | |
| 1T-216 | S. sanguinis | FFLNVIAIRIPHF | 210 |
| 1T-217 | F. nucleatum | MLSNVLSRSVVSPNVDIPNSMVILSPLLI | 211 |
| | S. sanguinis | SISNYH | |
| 1T-218 | F. nucleatum | KLIFAALGLVFLLIGLRDSRSK | 212 |
| | S. sanguinis | | |
| 1T-219 | S. sanguinis | RNINVSATFITEKSLV | 213 |
| 1T-221 | A. naeslundii | DIGRIIGKKGRTITAIRSIVYSVPTQGKK | 214 |
| | F. nucleatum | VRLVIDEK | |
| | P. gingivalis | | |
| | S. epidermidis | | |
| | S. gordonii | | |
| | S. mitis | | |
| | S. mutans | | |
| | S. oralis | | |
| | S. salivarious | | |
| | S. sanguinis | | |
| 1T-222 | F. nucleatum | RIEASLISAIMFSMFNAIVKFLQK | 215 |
| | S. sanguinis | | |
| 1T-223 | A. naeslundii | NQKMEINSMTSEKEKMLAGHFHNEAN | 216 |
| | F. nucleatum | FAVIFKYSLFYNFF | |
| | P. gingivalis | | |
| | S. epidermidis | | |
| | S. gordonii | | |
| | S. mitis | | |
| | S. mutans | | |
| | S. oralis | | |
| | S. salivarious | | |
| | S. sanguinis | | |
| 1T-225 | A. naeslundii | RRSLGNSASFAEWIEYIRYLHYIIRVQFI | 217 |
| | F. nucleatum | HFFSKNKKI | |
| | P. gingivalis | | |
| | S. epidermidis | | |
| | S. gordonii | | |
| | S. mitis | | |
| | S. mutans | | |
| | S. oralis | | |
| | S. salivarious | | |
| | S. sanguinis | | |
| 1T-226 | A. naeslundii | KLQEKQIDRNFERVSGYSTYRAVQAAK | 218 |
| | F. nucleatum | AKEKGFISLEN | |
| | S. epidermidis | | |
| | S. gordonii | | |
| | S. mitis | | |
| | S. mutans | | |
| | S. oralis | | |
| | S. salivarious | | |
| | S. sanguinis | | |
| 1T-228 | A. naeslundii | IFKLFEEHLLYLLDAFYYSKIFRRLKQGL | 219 |
| | F. nucleatum | YRRKEQPYTQDLFRM | |
| | P. gingivalis | | |
| | S. epidermidis | | |
| | S. gordonii | | |
| | S. mitis | | |
| | S. mutans | | |
| | S. oralis | | |
| | S. salivarious | | |
| | S. sanguinis | | |
| 1T-230 | A. naeslundii | EFLEKFKVLKQPRKANNISKNRVAMIFL | 220 |
| | F. nucleatum | TIHKSRGFLSSPY | |
| | P. gingivalis | | |
| | S. epidermidis | | |
| | S. gordonii | | |
| | S. mitis | | |
| | S. mutans | | |
| | S. oralis | | |
| | S. salivarious | | |
| | S. sanguinis | | |
| 1T-233 | A. naeslundii | TDQELEHLIVTELESKRLDFTYSKDITEF | 221 |
| | P. gingivalis | FDEAFPEYDQNY | |
| | S. epidermidis | | |
| | S. gordonii | | |
| | S. mitis | | |
| | S. mutans | | |
| | S. oralis | | |
| | S. salivarious | | |
| | S. sanguinis | | |
| 1T-234 | A. naeslundii | DNFYLILKMEERGKSKKTSQTRGFRAFF | 222 |
| | F. nucleatum | DIIRKKIKKEDGK | |
| | P. gingivalis | | |
| | S. epidermidis | | |
| | S. gordonii | | |
| | S. mitis | | |
| | S. mutans | | |
| | S. oralis | | |
| | S. salivarious | | |
| | S. sanguinis | | |
| 1T-237 | S. sanguinis | EDPVPNHFTLRRNKKEKPSKS | 223 |
| 1T-238 | A. naeslundii | IFNRRKFFQYFGLSKEAMVEHIQPFILDI | 224 |
| | F. nucleatum | WQIHLF | |
| | P. gingivalis | | |
| | S. epidermidis | | |
| | S. gordonii | | |
| | S. mitis | | |
| | S. mutans | | |
| | S. oralis | | |
| | S. salivarious | | |
| | S. sanguinis | | |
| 1T-239 | A. naeslundii | ADDLLNKRLTDLIMENAETVKTIDLDN | 225 |
| | S. gordonii | SD | |
| | S. mitis | | |
| | S. mutans | | |
| | S. oralis | | |
| | S. sanguinis | | |
| 1T-240 | A. naeslundii | VILGNGISNIAQTLGQLPNIAWVWIYMV | 226 |
| | F. nucleatum | LIAALLEESNVC | |
| | P. gingivalis | | |
| | S. epidermidis | | |
| | S. gordonii | | |
| | S. mitis | | |
| | S. mutans | | |
| | S. oralis | | |
| | S. salivarious | | |
| | S. sanguinis | | |
| 1T-242 | F. nucleatum | KQVQNTTLIICGTVLLGILFKSYLKSQKSV | 227 |
| | S. sanguinis | | |
| 1T-243 | A. naeslundii | SENIARFAAAFENEQVVSYARWFRRSW | 228 |
| | P. gingivalis | RGSGSSSRF | |
| | S. epidermidis | | |
| | S. gordonii | | |
| | S. mitis | | |
| | S. mutans | | |
| | S. oralis | | |
| | S. salivarious | | |
| | S. sanguinis | | |
| 1T-248 | S. sanguinis | IGGALNSCG | 229 |
| 1T-249 | F. nucleatum | VFSVLKHTTWPTRKQSWHDFISILEYSA | 230 |
| | S. sanguinis | FFALVIFIFDKLLTLGLAELLKRF | |
| 1T-250 | S. mitis | LVQGDTILIENHVGTPVKDDGKDCLIIR | 231 |
| | S. mutans | EADVLAVVND | |
| | S. oralis | | |
| 1T-252 | F. nucleatum | MKKNLKRFYALVLGFIIGCLFVSILIFIGY | 232 |
| | S. sanguinis | | |
| 1T-253 | A. naeslundii | KTKESLTQQEKKFLKDYDRKSLHHFRD | 233 |
| | F. nucleatum | ILTYCFILDKLTNK | |
| | P. gingivalis | | |
| | S. epidermidis | | |
| | S. gordonii | | |
| | S. mitis | | |
| | S. mutans | | |
| | S. oralis | | |
| | S. salivarious | | |
| | S. sanguinis | | |
| 1T-256 | S. sanguinis | KGKSLMPLLKQINQWGKLYL | 234 |
| 1T-257 | A. naeslundii | IILAKAADLAEIERIISEDPFKINEIANYDI | 235 |
| | F. nucleatum | IEFCPTKSSKAFEKVLK | |
| | P. gingivalis | | |
| | S. epidermidis | | |
| | S. gordonii | | |
| | S. mitis | | |
| | S. mutans | | |
| | S. oralis | | |
| | S. salivarious | | |
| | S. sanguinis | | |
| 1T-258 | A. naeslundii | TINIDDKVLDYLKKINSKAITIDLIGCAS | 236 |
| | F. nucleatum | | |
| | P. gingivalis | | |
| | T. denticola | | |
| | S. mitis | | |
| | S. mutans | | |
| | S. oralis | | |
| 1T-259 | F. nucleatum | EKLKKILLKLAVCGKAWYTL | 237 |
| | P. gingivalis | | |
| | T. denticola | | |
| | S. mitis | | |
| | S. mutans | | |
| | S. oralis | | |
| | S. sanguinis | | |
| 1T-260 | A. naeslundii | NILYFIHDENQWEPQKAEIFRGSIKHCA | 238 |
| | P. gingivalis | WLSS | |
| | S. epidermidis | | |
| | S. gordonii | | |
| | S. mitis | | |
| | S. mutans | | |
| | S. oralis | | |
| | S. sanguinis | | |
| 1T-261 | F. nucleatum | SFEKNKIENNLKIAQAYIYIKPKPRICQA | 239 |
| | S. mutans | | |
| | S. oralis | | |
| | S. sanguinis | | |
| 1T-262 | A. naeslundii | LSLPLIVLTKSI | 240 |
| | F. nucleatum | | |
| | P. gingivalis | | |
| | S. epidermidis | | |
| | S. gordonii | | |
| | S. mitis | | |
| | S. mutans | | |
| | S. oralis | | |
| | S. salivarious | | |
| | S. sanguinis | | |
| 1T-263 | A. naeslundii | FIAVSFTGNPATFKLVIGCKADN | 241 |
| | F. nucleatum | | |
| | P. gingivalis | | |
| | S. epidermidis | | |
| | S. gordonii | | |
| | S. mitis | | |
| | S. oralis | | |
| | S. salivarious | | |
| | S. sanguinis | | |
| 1T-264 | S. sanguinis | LEGKFYMAEDFDKTPECFKDYV | 242 |
| 1T-265 | A. naeslundii | GMFENLLMINFQIMNDLKIEIVVKDRIC | 243 |
| | F. nucleatum | AV | |
| | P. gingivalis | | |
| | S. epidermidis | | |
| | S. gordonii | | |
| | S. mitis | | |
| | S. mutans | | |
| | S. oralis | | |
| | S. salivarious | | |
| | S. sanguinis | | |
| 1T-266 | S. sanguinis | RAGTWLVVDEIR | 244 |
| 1T-267 | A. naeslundii | RIKEERKNRSYKFFIWRLFDEKTGFI | 245 |
| | F. nucleatum | | |
| | P. gingivalis | | |
| | T. denticola | | |
| | S. mitis | | |
| | S. mutans | | |
| | S. oralis | | |
| | S. sanguinis | | |
| 1T-268 | F. nucleatum | PITPKKEKCGLGTYAPKNPVFSKSRV | 246 |
| | S. mutans | | |
| | S. oralis | | |
| | S. sanguinis | | |
| 1T-269 | F. nucleatum | PLYVAAVEKINTAKKH | 247 |
| | S. mutans | | |
| | S. oralis | | |
| | S. sanguinis | | |
| 1T-270 | F. nucleatum | VHEFDIQKILQNR | 248 |
| | S. mutans | | |
| | S. oralis | | |
| | S. sanguinis | | |
| 1T-271 | A. naeslundii | FLIQKFLLIKTFPPYRKKYVVIVSQTGTA | 249 |
| | F. nucleatum | | |
| | P. gingivalis | | |
| | S. epidermidis | | |
| | S. gordonii | | |
| | S. mitis | | |
| | S. mutans | | |
| | S. oralis | | |
| | S. salivarious | | |
| | S. sanguinis | | |
| 1T-272 | F. nucleatum | QLAPIDKQLKAVKKIAFYESESTAAKAV | 250 |
| | S. mutans | TVA | |
| | S. oralis | | |
| | S. sanguinis | | |
| 1T-273 | F. nucleatum | YNEPNYKWLESYKIYKQRCEDRTGMY | 251 |
| | P. gingivalis | YTEET | |
| | T. denticola | | |
| | S. mitis | | |
| | S. mutans | | |
| | S. oralis | | |
| 1T-274 | F. nucleatum | ETTTEINAIKLHRIKQRSPQGTRRVN | 252 |
| | S. mutans | | |
| | S. oralis | | |
| | S. sanguinis | | |
| 1T-275 | A. naeslundii | QVLKNFSISRRYKINNPFFKILLFIQLRTL | 253 |
| | F. nucleatum | | |
| | P. gingivalis | | |
| | T. denticola | | |
| | S. epidermidis | | |
| | S. gordonii | | |
| | S. mitis | | |
| | S. mutans | | |
| | S. oralis | | |
| | S. salivarious | | |
| | S. sanguinis | | |
| 1T-276 | A. naeslundii | ILTLLILGSIGFFILKIKLKLGRF | 254 |
| | F. nucleatum | | |
| | P. gingivalis | | |
| | S. epidermidis | | |
| | S. gordonii | | |
| | S. mitis | | |
| | S. mutans | | |
| | S. oralis | | |
| | S. sanguinis | | |
| 1T-277 | A. naeslundii | IYYMRFVNKPLEKTFFKI | 255 |
| | F. nucleatum | | |
| | P. gingivalis | | |
| | T. denticola | | |
| | S. gordonii | | |
| | S. mitis | | |
| | S. mutans | | |
| | S. oralis | | |
| | S. salivarious | | |
| | S. sanguinis | | |
| 1T-278 | A. naeslundii | SINSSAGIQPHCLSSSFVLRTKHCFY | 256 |
| | F. nucleatum | | |
| | P. gingivalis | | |
| | S. gordonii | | |
| | S. mitis | | |
| | S. mutans | | |
| | S. oralis | | |
| | S. salivarious | | |
| | S. sanguinis | | |
| 1T-279 | A. naeslundii | FVLRTKHCFY | 257 |
| | F. nucleatum | | |
| | P. gingivalis | | |
| | S. gordonii | | |
| | S. mitis | | |
| | S. mutans | | |
| | S. oralis | | |
| | S. salivarious | | |
| | S. sanguinis | | |
| 1T-280 | A. naeslundii | TNNKNKVIIKAIKFKNKDFINLDLFIYRR | 258 |
| | F. nucleatum | | |
| | P. gingivalis | | |
| | T. denticola | | |
| | S. gordonii | | |
| | S. mitis | | |
| | S. mutans | | |
| | S. oralis | | |
| | S. salivarious | | |
| | S. sanguinis | | |
| 1T-281 | A. naeslundii | KYEKLTKENLFIRNSGNMCVFIYFLFFG | 259 |
| | F. nucleatum | | |
| | P. gingivalis | | |
| | S. epidermidis | | |
| | S. gordonii | | |
| | S. mitis | | |
| | S. mutans | | |
| | S. oralis | | |
| | S. salivarious | | |
| | S. sanguinis | | |
| 1T-282 | F. nucleatum | ISLVFPAYT | 260 |
| | P. gingivalis | | |
| | S. gordonii | | |
| | S. mitis | | |
| | S. mutans | | |
| | S. oralis | | |
| | S. salivarious | | |
| | S. sanguinis | | |
| 1T-283 | A. naeslundii | LCTKLEDKQRGRIPAELFIISPIKILERND | 261 |
| | F. nucleatum | AL | |
| | P. gingivalis | | |
| | T. denticola | | |
| | S. epidermidis | | |
| | S. gordonii | | |
| | S. mitis | | |
| | S. mutans | | |
| | S. oralis | | |
| | S. salivarious | | |
| | S. sanguinis | | |
| 1T-284 | A. naeslundii | FQYYFSLKRV | 262 |
| | F. nucleatum | | |
| | P. gingivalis | | |
| | S. gordonii | | |
| | S. mitis | | |
| | S. mutans | | |
| | S. oralis | | |
| | S. salivarious | | |
| | S. sanguinis | | |
| 1T-285 | A. naeslundii | FFPYYLADFYKQLKFLNEYQTKNKDKV | 263 |
| | F. nucleatum | VEFK | |
| | P. gingivalis | | |
| | S. gordonii | | |
| | S. mitis | | |
| | S. mutans | | |
| | S. oralis | | |
| | S. salivarious | | |
| | S. sanguinis | | |
| 1T-286 | S. sanguinis | LGFFNNKADLVKADTERDNRMSSLKIK | 264 |
| | | DL | |
| 1T-287 | P. gingivalis | KGYPLPFQYRLNNH | 265 |
| | T. denticola | | |
| | S. gordonii | | |
| | S. mitis | | |
| | S. mutans | | |
| | S. oralis | | |
| | S. salivarious | | |
| | S. sanguinis | | |
| 1T-288 | F. nucleatum | RWVGGEPSADIYLSAKDTKT | 266 |
| | S. gordonii | | |
| | S. salivarious | | |
| | S. sanguinis | | |
| 1T-289 | F. nucleatum | EPSADIYLSAKDTKT | 267 |
| | P. gingivalis | | |
| | S. gordonii | | |
| | S. mitis | | |
| | S. mutans | | |
| | S. oralis | | |
| | S. sanguinis | | |
| 1T-290 | A. naeslundii | IINQLNLILLRLMEILIL | 268 |
| | F. nucleatum | | |
| | P. gingivalis | | |
| | S. gordonii | | |
| | S. mitis | | |
| | S. mutans | | |
| | S. oralis | | |
| | S. salivarious | | |
| | S. sanguinis | | |
| 1T-291 | A. naeslundii | DMKIIKLYIKILSFLFIKYCNKKLNSVKL | 269 |
| | F. nucleatum | KA | |
| | P. gingivalis | | |
| | T. denticola | | |
| | S. mitis | | |
| | S. mutans | | |
| | S. oralis | | |
| 1T-292 | A. naeslundii | IINQLNLILLRLMEILIL | 270 |
| | F. nucleatum | | |
| | P. gingivalis | | |
| | S. epidermidis | | |
| | S. gordonii | | |
| | S. mitis | | |
| | S. mutans | | |
| | S. oralis | | |
| | S. salivarious | | |
| | S. sanguinis | | |
| 1T-293 | A. naeslundii | HVEDCFLLSNARTTAIHGRANPARGEPR | 271 |
| | F. nucleatum | TRSE | |
| | P. gingivalis | | |
| | S. epidermidis | | |
| | S. gordonii | | |
| | S. mitis | | |
| | S. mutans | | |
| | S. oralis | | |
| | S. salivarious | | |
| | S. sanguinis | | |
| 1T-294 | T. denticola | YDKIADGVFKIGKRGVL | 272 |
| 1T-295 | S. mitis | KYKLKKIIL | 273 |
| | S. salivarious | | |
| | S. sanguinis | | |
| 1T-296 | A. naeslundii | EYSQQSFKAKPCSERGVLSP | 274 |
| | F. nucleatum | | |
| | P. gingivalis | | |
| | S. gordonii | | |
| | S. mitis | | |
| | S. mutans | | |
| | S. oralis | | |
| | S. salivarious | | |
| | S. sanguinis | | |
| 1T-297 | A. naeslundii | RSLRLNNALTKLPKLWYNRIKEAFYAY | 275 |
| | F. nucleatum | NDYDK | |
| | T. denticola | | |
| | S. mitis | | |
| | S. mutans | | |
| | S. oralis | | |
| 1T-298 | A. naeslundii | ILNKKPKLPLWKLGKNYFRRFYVLPTFLA | 276 |
| | F. nucleatum | | |
| | P. gingivalis | | |
| | T. denticola | | |
| | S. gordonii | | |
| | S. mitis | | |
| | S. mutans | | |
| | S. oralis | | |
| | S. salivarious | | |
| | S. sanguinis | | |
| 1T-299 | A. naeslundii | SMLTSFLRSKNTRSLKMYKDVHF | 277 |
| | F. nucleatum | | |
| | S. epidermidis | | |
| | S. gordonii | | |
| | S. mitis | | |
| | S. mutans | | |
| | S. oralis | | |
| | S. salivarious | | |
| | S. sanguinis | | |
| 1T-300 | A. naeslundii | PLIISKAQIKMSGDILGSCFKLFYLRPFF | 278 |
| | F. nucleatum | | |
| | P. gingivalis | | |
| | S. epidermidis | | |
| | S. gordonii | | |
| | S. mitis | | |
| | S. mutans | | |
| | S. oralis | | |
| | S. salivarious | | |
| | S. sanguinis | | |
| 1T-301 | F. nucleatum | SKLPRVLDASLKL | 279 |
| | S. gordonii | | |
| | S. sanguinis | | |
| 1T-302 | A. naeslundii | IIIILPKIYLVCKTV | 280 |
| | P. gingivalis | | |
| | S. epidermidis | | |
| | S. gordonii | | |
| | S. mitis | | |
| | S. mutans | | |
| | S. oralis | | |
| | S. salivarious | | |
| | S. sanguinis | | |
| 1T-303 | A. naeslundii | LDYENMDCKKRIRI | 281 |
| | F. nucleatum | | |
| | P. gingivalis | | |
| | S. gordonii | | |
| | S. mitis | | |
| | S. mutans | | |
| | S. oralis | | |
| | S. salivarious | | |
| | S. sanguinis | | |
| 1T-304 | P. gingivalis | STAGEASRRTASEASRRTAAKLRG | 282 |
| TT-305 | F. nucleatum | ARNALNMRDVPVDAAIIGIIDGMDEE | 283 |
| TT-306 | F. nucleatum | KILNEAEGKLLKVIEKNGEIDIEEI | 284 |
| TT-307 | F. nucleatum | NGDKKAKEELDKWDEVIKELNIQF | 285 |
| TT-308 | F. nucleatum | GLVIIPNLIALIILFSQVRQQTKDYFSNPK | 286 |
| | | LSSR | |
| TT-309 | F. nucleatum | EPLPLTKYDKKDTEMKKVFKEILAGKV | 287 |
| | | GYEKEEE | |
| TT-310 | F. nucleatum | TKLKKNNKLLSAKKENTLHTKDK | 288 |
| TT-311 | S. mutans | AIFDAMHNL | 289 |
| | S. sobrinus | | |
| PVCFBP2461 | P. fluorescens | DLys-Dorn-Gly-DThr-Thr-Gln-Gly-DSer- | 290 |
| | | cDOrn | |
| CHA0 | P. fluorescens | Asp-DOrn-Lys-c(Thr-Ala-Ala-DOrn-Lys) | 291 |
| CFBP2461 | P. putida | Asp-Lys-DAsp-Ser-DThr-DAla-Thr-DLys- | 292 |
| | | cOrn | |
| NCPPB2192 | P. tolaasii | DSer-Lys-Ser-DSer-Thr-DSer-Orn-Thr- | 293 |
| | | DSer-cDOrn | |
| PyC-E | P. aeruginosa | DSer-Arg-DSer-Orn-c(Lys-Orn-Thr-Thr) | 294 |
| PyR | P. aeruginosa | DSer-Dab-Orn-DGln-Gln-DOrn-Gly | 295 |
| PyPaTII | P. aeruginosa | DSer-DOrn-Orn-Gly-DThr-Ser-cOrn | 296 |
| Py Pap | P. aptata | DAla-Lys-Thr-DSer-Orm-cOrn | 297 |
| Py Pau | P. aureofaciens | DSer-DOrn-Gly-DThr-Thr-Gln-Gly-DSer- | 298 |
| | | cDOrn | |
| Ps | P. fluorescens | Lys-DAsp-Ala-DThr-Ala-cDOrn | 299 |
| Py I-III | P. fluorescens | Asn-DOrn-Lys-c(Thr-DAla-DAla-DOrn- | 300 |
| | | Lys) | |
| Py Gm | P. fluorescens | DAla-Lys-Gly-Gly-Asp-DGln-DSer-Ala- | 301 |
| | | DAla-DAla-Ala-cOrn | |
| Py Pf 12 | P. fluorescens | DSer-Lys-Gly-Orn-DSer-Ser-Gly-c(Lys- | 302 |
| | | DOrn-Glu-Ser) | |
| Py Pf | P. fluorescens | c(DSer-Dab)-Gly-Ser-Asp-Ala-Gly-DAla- | 303 |
| 2798 | | Gly-cOrn | |
| Py Pf | P. fluorescens | Ser-Lys-Gly-Orn-c(Lys-DOrn-Ser) | 304 |
| 13525 | | | |
| Py Pf | P. fluorescens | DAla-DLys-Gly-Gly-Asp-DGln-Dab-Ser- | 305 |
| 17400 | | DAla-cOrn | |
| Py 51W | P. fluorescens | DAla-DLys-Gly-Gly-DAsp-DGln-DSer-Ala- | 306 |
| | | Gly-DThr-cOrn | |
| Py 9AW | P. fluorescens | DSer-Lys-His-DThr-Ser-cOrn | 307 |
| Ps A225 | P. fluorescens | DSer-DAla-DOrn-Gly-c(DSer-DAsp-DSer- | 308 |
| | | DThr) | |
| Py Pf 1.3 | P. fluorescens | DAla-DLys-Gly-Gly-Asp-c(DGln-Dab)-Gly- | 309 |
| | | Ser-cOrn | |
| Py Pf | P. fluorescens | DSer-Lys-Gly-Orn-Ser-DSer-Gly-c(Lys- | 310 |
| 18.1 | | DOrn-Ser) | |
| Py Pf | P. fluorescens | DSer-DOrn-Ala-Gly-DThr-Ala-cOrn | 311 |
| PL7 | | | |
| Py Pf | P. fluorescens | DLys-DOrn-Ala-Gly-DThr-Ser-cOrn | 312 |
| PL8 | | | |
| Py Pf | P. fluorescens | DSer-DSer-Orn-DSer-DSer-c(DSer-Orn- | 313 |
| BTP7 | | Lys-Lys) | |
| Ps 589A | P. putida | Asp-Lys-Asp-DSer-Thr-DAla-DGlu-DSer- | 314 |
| | | cOrn | |
| Py Pp 1,2 | P. putida | Ser-Thr-DSer-Orn-Asp-DGln-Dab-Ser- | 315 |
| | | DThr-cOrn | |
| Py Pp | P. putida | Asp-DOrn-DDab-Thr-Gly-DSer-Ser-Asp- | 316 |
| C2,3 | | Thr | |
| Py G4R | P. putida | Asp-Orn-DAsp-Dab-Gly-Ser-cOrn | 317 |
| Py | P. putida | Asp-DOrn-DDab-Thr-Gly-DSer-DSer-Thr- | 318 |
| PpBTP16 | | Asp | |
| Py | P. putida | DSer-DAla-DOrn-Gly-DAla-DAsp-c(DSer- | 319 |
| Pp39167 | | DThr) | |
| iPy Pp | P. putida | Asp-Ala-Asp-DOrn-Ser-cOrn | 320 |
| BTP1 | | | |
| Py | P. tolaasii | DSer-Lys-Ser-DSer-Thr-DSer-Orn-Thr- | 321 |
| PT2192 | | DSer-Orn | |
| Ps 7SR1 | Pseudomonas spp. | DSer-DAsp-DThr-c(DSer-D-Orn-Ala-Gly- | 322 |
| | | DSer) | |
| Ps A214 | Pseudomonas spp. | DSer-DAla-Gly-DSer-DAla-DAsp-DThr- | 323 |
| | | DOrn | |
| Azoverdin | Pseudomonas spp. | Hse-DHse-Dab-DOrn-DSer-Orn | 324 |
| | A. macrocytogenes | | |
| PF-S024 | Corynebacteria | SKRGRKRKDRRKKKANHGKRPNS | 325 |
| | spp. | | |
| PF-001 | S. epidermidis | MNNWIIVAQLSVTVINEIIDIMKEKQKG | 326 |
| | M. luteus | GK | |
| | P. mirabilis | | |
| | E. coli | | |
| | P. aeruginosa | | |
| | C. albicans | | |
| | MRSA | | |
| | E. faecalis | | |
| | C. jeikeium | | |
| PF-002 | S. epidermidis | NDDAQ | 327 |
| | P. mirabilis | | |
| | C. albicans | | |
| | C. jeikeium | | |
| | C. jejuni | | |
| PF-003 | S. epidermidis | MNNWIKVAQISVTVINEVIDIMKEKQN | 328 |
| | M. luteus | GGK | |
| | P. mirabilis | | |
| | C. albicans | | |
| | MRSA | | |
| | C. jeikeium | | |
| PF-004 | S. epidermidis | ARLSKAIIIAVIVVYHLDVRGLF | 329 |
| | B. subtilis | | |
| | B. fragilis | | |
| | E. coli | | |
| | P. aeruginosa | | |
| | C. albicans | | |
| | S. pneumoniae | | |
| | E. faecalis | | |
| | C. jeikeium | | |
| PF-005 | S. epidermidis | MESIFKIKLMNGICRSENMNMKKKNKG | 330 |
| | E. coli | EKI | |
| | MRSA | | |
| | S. pneumoniae | | |
| | E. faecalis | | |
| PF-006 | S. epidermidis | MGIIAGIIKFIKGLIEKFTGK | 331 |
| | M. luteus | | |
| | E. coli | | |
| | P. aeruginosa | | |
| | MRSA | | |
| | E. faecalis | | |
| | C. jeikeium | | |
| | C. jejuni | | |
| PF-007 | S. epidermidis | MGIIAGIIKVIKSLIEQFTGK | 332 |
| | M. luteus | | |
| | E. coli | | |
| | P. aeruginosa | | |
| | C. albicans | | |
| | MRSA | | |
| | S. pneumoniae | | |
| | E. faecalis | | |
| | C. jeikeium | | |
| PF-008 | S. epidermidis | MIEIGSIAYLNGGSKKYNHILNQENR | 333 |
| | M. luteus | | |
| | MRSA | | |
| | C. jejuni | | |
| PF-009 | M. luteus | SKKYNHILNQENR | 334 |
| | P. mirabilis | | |
| | C. albicans | | |
| PF-010 | S. epidermidis | MDIDVNKLLQAFVYFKSFEKLRHNNS | 335 |
| | M. luteus | | |
| | E. coli | | |
| | C. albicans | | |
| PF-011 | M. luteus | MFCYYKQHKGDNFSIEEVKNIIADNEM | 336 |
| | E. coli | KVN | |
| | P. aeruginosa | | |
| | S. pneumoniae | | |
| | C. jeikeium | | |
| PF-012 | S. epidermidis | WRGPNTEAGGKSANNIVQVGGAPT | 337 |
| | M. luteus | | |
| | P. mirabilis | | |
| | E. coli | | |
| | P. aeruginosa | | |
| | MRSA | | |
| | S. pneumoniae | | |
| | C. jeikeium | | |
| | C. jejuni | | |
| PF-013 | M. luteus | LIQKGLNQTFIVVIRLNNFIKKS | 338 |
| | P. mirabilis | | |
| | E. coli | | |
| | P. aeruginosa | | |
| | MRSA | | |
| | S. pneumoniae | | |
| | C. jeikeium | | |
| | C. jejuni | | |
| PF-014 | E. coli | HPTDNKHN | 339 |
| | C. jeikeium | | |
| PF-015 | E. faecalis | SIDKRNLYNLKYYE | 340 |
| | C. jeikeium | | |
| PF-016 | S. epidermidis | RKQYDDLSFNFLY | 341 |
| | E. faecalis | | |
| | C. jeikeium | | |
| PF-017 | E. coli | ESIIE | 342 |
| PF-018 | E. coli | YYKTYFKEV | 343 |
| | C. jeikeium | | |
| PF-020 | S. epidermidis | MKIILLLFLIFGFIVVVTLKSEHQLTLFSI | 344 |
| | M. luteus | | |
| | C. albicans | | |
| | MRSA | | |
| | S. pneumoniae | | |
| | E. faecalis | | |
| PF-021 | S. epidermidis | FSLNFSKQKYVTVN | 345 |
| | M. luteus | | |
| | P. mirabilis | | |
| | E. coli | | |
| | C. albicans | | |
| | E. faecalis | | |
| | C. jeikeium | | |
| PF-022 | M. luteus | MINELKNKNSGIMNNYVVTKESKL | 346 |
| | P. mirabilis | | |
| | E. coli | | |
| | P. aeruginosa | | |
| | C. albicans | | |
| | MRSA | | |
| | S. pneumoniae | | |
| | E. faecalis | | |
| | C. jeikeium | | |
| | C. jejuni | | |
| PF-023 | M. luteus | MTKNTIISLENEKTQINDSENESSDLRKAK | 347 |
| | C. jeikeium | | |
| PF-024 | M. luteus | DLRKAK | 348 |
| | C. albicans | | |
| | MRSA | | |
| | E. faecalis | | |
| | C. jeikeium | | |
| PF-025 | S. epidermidis | LLIIFRLWLELKWKNKK | 349 |
| | M. luteus | | |
| | P. mirabilis | | |
| | E. coli | | |
| | P. aeruginosa | | |
| | MRSA | | |
| | E. faecalis | | |
| | C. jejuni | | |
| PF-026 | S. epidermidis | SIHFIN | 350 |
| | M. luteus | | |
| | P. mirabilis | | |
| | C. albicans | | |
| | MRSA | | |
| | E. faecalis | | |
| | C. jeikeium | | |
| PF-027 | M. luteus | HNARKYLEFISQKIDGDKLTKEDSL | 351 |
| | MRSA | | |
| | E. faecalis | | |
| | C. jejuni | | |
| PF-028 | S. epidermidis | ALDCSEQSVILWYETILDKIVGVIK | 352 |
| | M. luteus | | |
| | MRSA | | |
| PF-029 | S. epidermidis | NSTNE | 353 |
| | M. luteus | | |
| | C. albicans | | |
| | C. jejuni | | |
| PF-030 | S. epidermidis | MTCHQAPTTTHQSNMA | 354 |
| | M. luteus | | |
| | P. mirabilis | | |
| | E. coli | | |
| | P. aeruginosa | | |
| | C. albicans | | |
| | MRSA | | |
| | S. pneumoniae | | |
| | E. faecalis | | |
| | C. jeikeium | | |
| | C. jejuni | | |
| PF-031 | M. luteus | MPHHSTTSSRIVVPAHQSNMASTPNLSI | 355 |
| | C. albicans | TP | |
| PF-033 | S. epidermidis | MFIFKTTSKSHFHNNVKSLECIKIPINKNR | 356 |
| | M. luteus | | |
| | E. coli | | |
| | P. aeruginosa | | |
| | C. albicans | | |
| | MRSA | | |
| | S. pneumoniae | | |
| PF-034 | M. luteus | EPKKKHFPKMESASSEP | 357 |
| PF-035 | S. epidermidis | SFYESY | 358 |
| | M. luteus | | |
| | E. coli | | |
| | C. albicans | | |
| | MRSA | | |
| | C. jeikeium | | |
| | C. jejuni | | |
| PF-036 | S. epidermidis | ILNRLSRIVSNEVTSLIYSLK | 359 |
| | M. luteus | | |
| | P. mirabilis | | |
| | E. coli | | |
| | C. albicans | | |
| | MRSA | | |
| | S. pneumoniae | | |
| | C. jejuni | | |
| PF-037 | S. epidermidis | MTKKRRYDTTEFGLAHSMTAKITLHQA | 360 |
| | M. luteus | LYK | |
| | P. aeruginosa | | |
| | C. albicans | | |
| | MRSA | | |
| | S. pneumoniae | | |
| | E. faecalis | | |
| | C. jeikeium | | |
| PF-038 | M. luteus | MAYKDEGKETKFAVKGYKD | 361 |
| PF-039 | P. mirabilis | MLEEKNKSL | 362 |
| | C. jeikeium | | |
| PF-040 | S. epidermidis | MIHLTKQNTMEALHFIKQFYDMFFILNF | 363 |
| | M. luteus | NV | |
| | P. mirabilis | | |
| | E. coli | | |
| | P. aeruginosa | | |
| | C. albicans | | |
| | MRSA | | |
| | S. pneumoniae | | |
| | E. faecalis | | |
| | C. jeikeium | | |
| | C. jejuni | | |
| PF-041 | MRSA | ELLVILPGFI | 364 |
| PF-042 | S. epidermidis | LLLSYFRYTGALLQSLF | 365 |
| | M. luteus | | |
| | P. mirabilis | | |
| | E. coli | | |
| | P. aeruginosa | | |
| | C. albicans | | |
| | MRSA | | |
| | S. pneumoniae | | |
| | E. faecalis | | |
| | C. jeikeium | | |
| PF-043 | M. luteus | MIKNETAYQMNELLVIRSAYAK | 366 |
| | C. jejuni | | |
| PF-044 | S. epidermidis | KLKKYIHKPD | 367 |
| | M. luteus | | |
| | MRSA | | |
| | C. jeikeium | | |
| PF-045 | S. epidermidis | LDINDYRSTY | 368 |
| | E. coli | | |
| | E. faecalis | | |
| | C. jejuni | | |
| PF-046 | E. coli | LDFYLTKHLTLML | 369 |
| | E. faecalis | | |
| | C. jeikeium | | |
| PF-047 | S. mutans | NQEPSLQQDKEQKDNKG | 370 |
| PF-048 | S. epidermidis | LYFAFKKYQERVNQAPNIEY | 371 |
| | M. luteus | | |
| | E. coli | | |
| | MRSA | | |
| | C. jeikeium | | |
| | C. jejuni | | |
| PF-049 | S. epidermidis | AYYLKRREEKGK | 372 |
| | MRSA | | |
| | C. jeikeium | | |
| | C. jejuni | | |
| PF-050 | S. epidermidis | SYYLKRREEKGK | 373 |
| | M. luteus | | |
| | E. coli | | |
| | C. jeikeium | | |
| PF-051 | S. epidermidis | RFFNFEIKKSTKVDYVFAHVDLSDV | 374 |
| | M. luteus | | |
| | P. aeruginosa | | |
| | C. albicans | | |
| | MRSA | | |
| | S. pneumoniae | | |
| | E. faecalis | | |
| PF-052 | S. epidermidis | QELINEAVNLLVKSK | 375 |
| | M. luteus | | |
| | E. coli | | |
| | MRSA | | |
| | E. faecalis | | |
| | C. jeikeium | | |
| | C. jejuni | | |
| PF-053 | S. epidermidis | KLFGQWGPELGSIYILPALIGSIILIAIVTL | 376 |
| | M. luteus | ILRAMRK | |
| | E. coli | | |
| | P. aeruginosa | | |
| | C. albicans | | |
| | MRSA | | |
| | S. pneumoniae | | |
| | E. faecalis | | |
| PF-054 | S. epidermidis | VSISRFIGGGHVFNGNNKRNL | 377 |
| | E. coli | | |
| PF-055 | S. mutans | GHVFNGNNKRNL | 378 |
| PF-056 | S. epidermidis | AEQLFGKQKQRGVDLFLNRLTIILSILFF | 379 |
| | M. luteus | VLMICISYLGM | |
| | P. mirabilis | | |
| | E. coli | | |
| | P. aeruginosa | | |
| | C. albicans | | |
| | MRSA | | |
| | S. pneumoniae | | |
| | E. faecalis | | |
| | C. jeikeium | | |
| PF-057 | S. epidermidis | TMIVISIPRFEEYMKARHKKWM | 380 |
| | M. luteus | | |
| | P. mirabilis | | |
| | E. coli | | |
| | P. aeruginosa | | |
| | C. albicans | | |
| | MRSA | | |
| | S. pneumoniae | | |
| | E. faecalis | | |
| | C. jeikeium | | |
| | C. jejuni | | |
| PF-058 | S. epidermidis | FADQSQDNA | 381 |
| | M. luteus | | |
| | E. coli | | |
| | C. albicans | | |
| | MRSA | | |
| | C. jeikeium | | |
| | C. jejuni | | |
| PF-060 | E. coli | HSSHL | 382 |
| | C. albicans | | |
| | C. jeikeium | | |
| PF-061 | S. epidermidis | GYNSYKAVQDVKTHSEEQRVTAKK | 383 |
| | S. pneumoniae | | |
| PF-062 | S. epidermidis | MKKKRINNDILGRMIYSSSIDKRNLYNL | 384 |
| | M. luteus | KYYE | |
| | E. coli | | |
| | P. aeruginosa | | |
| | MRSA | | |
| | S. pneumoniae | | |
| | E. faecalis | | |
| | C. jeikeium | | |
| PF-063 | S. epidermidis | IAAIIVLVLFQKGLLQIFNWILIQLQ | 385 |
| | M. luteus | | |
| | E. coli | | |
| | P. aeruginosa | | |
| | MRSA | | |
| | S. pneumoniae | | |
| | E. faecalis | | |
| | C. jeikeium | | |
| | C. jejuni | | |
| PF-064 | E. coli | DYYGKE | 386 |
| PF-065 | M. luteus | LEKNTRDNYFIHAIDRIYINTSKGLFPES | 387 |
| | E. coli | ELVAWG | |
| | P. aeruginosa | | |
| | C. albicans | | |
| | MRSA | | |
| | S. pneumoniae | | |
| | C. jeikeium | | |
| | C. jejuni | | |
| PF-066 | M. luteus | IKGTVKAVDETTVVITVNGHGTELTFEK | 388 |
| | E. coli | PAIKQVDPS | |
| | C. jeikeium | | |
| PF-067 | S. epidermidis | DLIVKVHICFVVKTASGYCYLNKREAQ | 389 |
| | M. luteus | AAI | |
| | P. mirabilis | | |
| | E. coli | | |
| | P. aeruginosa | | |
| | C. albicans | | |
| | MRSA | | |
| | S. pneumoniae | | |
| | E. faecalis | | |
| | C. jeikeium | | |
| | C. jejuni | | |
| PF-068 | S. epidermidis | SHLINNFGLSVINPSTPICLNFSPVFNLLT | 390 |
| | M. luteus | VYGITCN | |
| | P. mirabilis | | |
| | E. coli | | |
| | P. aeruginosa | | |
| | C. albicans | | |
| | MRSA | | |
| | S. pneumoniae | | |
| | E. faecalis | | |
| | C. jeikeium | | |
| PF-069 | E. faecalis | FDPVPLKKDKSASKHSHKHNH | 391 |
| | C. jejuni | | |
| PF-070 | S. epidermidis | SMVKSEIVDLLNGEDNDD | 392 |
| | C. jejuni | | |
| PF-071 | S. epidermidis | HCVIGNVVDIANLLKRRAVYRDIADVIK | 393 |
| | E. coli | MR | |
| | P. aeruginosa | | |
| | C. albicans | | |
| | MRSA | | |
| | S. pneumoniae | | |
| | E. faecalis | | |
| | C. jeikeium | | |
| | C. jejuni | | |
| PF-073 | S. epidermidis | CPSVTMDACALLQKFDFCNNISHFRHFF | 394 |
| | M. luteus | AIKQPIER | |
| | P. aeruginosa | | |
| | C. albicans | | |
| | MRSA | | |
| | S. pneumoniae | | |
| | E. faecalis | | |
| PF-074 | S. epidermidis | RDIHPIYFMTKD | 395 |
| | M. luteus | | |
| | MRSA | | |
| PF-075 | M. luteus | FVNSLIMKDLSDNDMRFKYEYYNREKDT | 396 |
| | E. coli | | |
| | P. aeruginosa | | |
| | MRSA | | |
| | C. jeikeium | | |
| PF-076 | S. epidermidis | LYQYELLSKEEYLKCTLIINQRRNEQK | 397 |
| | M. luteus | | |
| | E. coli | | |
| | P. aeruginosa | | |
| | C. albicans | | |
| | MRSA | | |
| | S. pneumoniae | | |
| | E. faecalis | | |
| | C. jeikeium | | |
| | C. jejuni | | |
| PF-097 | C. jeikeium | QPTQGEQGTRPRRPTPMRGLLI | 398 |
| PF-099 | S. epidermidis | EIIAYLEGRFANA | 399 |
| | M. luteus | | |
| | E. coli | | |
| | C. jeikeium | | |
| PF-101 | S. mutans | DPVPERQEQACACHRTAKPGK | 400 |
| PF-104 | MRSA | ERTAVNDLWI | 401 |
| | C. jeikeium | | |
| PF-123 | M. luteus | TTRPQVAEDRQLDDALKETFPASDPISP | 402 |
| | E. coli | | |
| PF-124 | S. epidermidis | MADGQIAAIAKLHGVPVATRNIRHFQSF | 403 |
| | M. luteus | GVELINPWSG | |
| | P. mirabilis | | |
| | E. coli | | |
| | P. aeruginosa | | |
| | C. albicans | | |
| | MRSA | | |
| | E. faecalis | | |
| | C. jejuni | | |
| PF-125 | S. epidermidis | YVVGALVILAVAGLIYSMLRKA | 404 |
| | M. luteus | | |
| | P. mirabilis | | |
| | E. coli | | |
| | P. aeruginosa | | |
| | C. albicans | | |
| | MRSA | | |
| | S. pneumoniae | | |
| | E. faecalis | | |
| | C. jejuni | | |
| PF-126 | S. epidermidis | FSPEAFGIGAAGVLGSFVTGLLIGWVAS | 405 |
| | M. luteus | LLRKAK | |
| | P. mirabilis | | |
| | E. coli | | |
| | P. aeruginosa | | |
| | C. albicans | | |
| | MRSA | | |
| | S. pneumoniae | | |
| | E. faecalis | | |
| | C. jeikeium | | |
| | C. jejuni | | |
| PF-127 | S. epidermidis | MLRYLSLFAVGLATGYAWGWIDGLAA | 406 |
| | M. luteus | SLAV | |
| | E. coli | | |
| | P. aeruginosa | | |
| | C. albicans | | |
| | MRSA | | |
| | S. pneumoniae | | |
| | E. faecalis | | |
| PF-128 | M. luteus | GIKVVAARFEEIQFSENFDSIILA | 407 |
| | P. aeruginosa | | |
| | E. faecalis | | |
| PF-129 | S. epidermidis | MKLLARDPWVCAWNDIW | 408 |
| | MRSA | | |
| | E. faecalis | | |
| | C. jeikeium | | |
| | C. jejuni | | |
| PF-130 | E. faecalis | LQRSDEESMPRRHEKYS | 409 |
| | C. jeikeium | | |
| | C. jejuni | | |
| PF-131 | S. epidermidis | RRAAARTKGNRR | 410 |
| | E. coli | | |
| | MRSA | | |
| | C. jeikeium | | |
| PF-132 | S. epidermidis | RPGDGAAEQGRSR | 411 |
| | C. jeikeium | | |
| PF-133 | S. epidermidis | GDPTAGQKPVECP | 412 |
| | C. jeikeium | | |
| | C. jejuni | | |
| | M. smegmatis | | |
| PF-134 | S. epidermidis | GKAMKRQDCSAL | 413 |
| | C. jeikeium | | |
| PF-135 | S. epidermidis | PPARPARIPQTPTLHGASLFRQRS | 414 |
| | M. luteus | | |
| | E. coli | | |
| | P. aeruginosa | | |
| | MRSA | | |
| | C. jeikeium | | |
| | M. smegmatis | | |
| PF-136 | S. epidermidis | LRGRVGRITACGYPP | 415 |
| | M. luteus | | |
| | P. mirabilis | | |
| | E. coli | | |
| | MRSA | | |
| | E. faecalis | | |
| | C. jeikeium | | |
| | C. jejuni | | |
| | M. smegmatis | | |
| PF-137 | S. epidermidis | VLGKGHDLLDVGKTALKSRVFAWLGGS | 416 |
| | P. mirabilis | | |
| | S. pneumoniae | | |
| | C. jeikeium | | |
| | C. jejuni | | |
| PF-138 | S. epidermidis | AVHHSLLFR | 417 |
| | M. luteus | | |
| | P. mirabilis | | |
| | E. coli | | |
| | C. albicans | | |
| | MRSA | | |
| | C. jeikeium | | |
| | C. jejuni | | |
| PF-139 | S. epidermidis | ALSKPAIQARTLCRRQDPP | 418 |
| | M. luteus | | |
| | P. mirabilis | | |
| | E. coli | | |
| | P. aeruginosa | | |
| | C. albicans | | |
| | S. pneumoniae | | |
| | E. faecalis | | |
| | C. jeikeium | | |
| | C. jejuni | | |
| PF-140 | S. epidermidis | FHRRVIRASEWALTTRSFSTPLRSAAR | 419 |
| | M. luteus | | |
| | P. mirabilis | | |
| | E. coli | | |
| | P. aeruginosa | | |
| | C. albicans | | |
| | MRSA | | |
| | S. pneumoniae | | |
| | E. faecalis | | |
| | C. jeikeium | | |
| | C. jejuni | | |
| | M. smegmatis | | |
| PF-141 | S. epidermidis | VVRRFQGM | 420 |
| | M. luteus | | |
| | C. albicans | | |
| | MRSA | | |
| | C. jeikeium | | |
| PF-142 | S. mutans | GIDRGCQAAR | 421 |
| PF-143 | S. epidermidis | LSPRPIIVSRRSRADNNNDWSR | 422 |
| | MRSA | | |
| | C. jeikeium | | |
| PF-144 | S. epidermidis | RSGQPVGRPSRRAWLR | 423 |
| | M. luteus | | |
| | E. coli | | |
| | C. albicans | | |
| | MRSA | | |
| | S. pneumoniae | | |
| | E. faecalis | | |
| | C. jeikeium | | |
| PF-145 | S. epidermidis | GIVLTGRAGLVSGACSMALGVGLG | 424 |
| | M. luteus | | |
| | P. mirabilis | | |
| | E. coli | | |
| | P. aeruginosa | | |
| | C. albicans | | |
| | MRSA | | |
| | S. pneumoniae | | |
| | E. faecalis | | |
| | C. jeikeium | | |
| | C. jejuni | | |
| | M. smegmatis | | |
| PF-146 | S. epidermidis | GCGKRRIITKSASRDTR | 425 |
| | M. luteus | | |
| | P. aeruginosa | | |
| | C. albicans | | |
| | MRSA | | |
| | C. jeikeium | | |
| PF-147 | S. epidermidis | RRPRRRRSGHGQSASAA | 426 |
| | M. luteus | | |
| | MRSA | | |
| PF-148 | S. epidermidis | RRGCTERLRRMARRNAWDLYAEHFY | 427 |
| | M. luteus | | |
| | P. mirabilis | | |
| | E. coli | | |
| | P. aeruginosa | | |
| | C. albicans | | |
| | MRSA | | |
| | S. pneumoniae | | |
| | E. faecalis | | |
| | C. jeikeium | | |
| | C. jejuni | | |
| | M. smegmatis | | |
| PF-149 | S. epidermidis | GKVSVLTRVPRSLGGAPANQ | 428 |
| | M. luteus | | |
| | E. coli | | |
| | MRSA | | |
| | C. jeikeium | | |
| PF-150 | S. epidermidis | EIQAKGTG | 429 |
| | MRSA | | |
| PF-151 | S. epidermidis | EEYPARVPLSGEDVTEARRH | 430 |
| | MRSA | | |
| | E. faecalis | | |
| | C. jeikeium | | |
| PF-152 | S. epidermidis | VGYFIWKDSHSRKG | 431 |
| | C. albicans | | |
| | MRSA | | |
| | E. faecalis | | |
| | C. jeikeium | | |
| PF-153 | M. luteus | GILARADCSQIA | 432 |
| | P. mirabilis | | |
| | E. coli | | |
| | MRSA | | |
| PF-154 | S. mutans | GIKKSKHPSTDDYVVKTTIDSL | 433 |
| PF-155 | C. jeikeium | GRYGDDSKERQGRAQ | 434 |
| PF-156 | S. epidermidis | LITAEQPATAPIAGK | 435 |
| | C. jeikeium | | |
| PF-157 | S. epidermidis | HTAVVWLAGVSGCVALSHCEPA | 436 |
| | M. luteus | | |
| | P. mirabilis | | |
| | E. coli | | |
| | P. aeruginosa | | |
| | C. albicans | | |
| | MRSA | | |
| | S. pneumoniae | | |
| | E. faecalis | | |
| | C. jeikeium | | |
| | C. jejuni | | |
| PF-158 | S. epidermidis | VRLESRPADLPE | 437 |
| PF-159 | S. epidermidis | TMAFVEKAQLRVPVGDDLPV | 438 |
| PF-160 | S. epidermidis | SFHASLTKNEKPIKSTG | 439 |
| PF-161 | S. epidermidis | RGRALASTATTRPARRRR | 440 |
| | M. luteus | | |
| | E. coli | | |
| | C. jejuni | | |
| PF-162 | S. epidermidis | GIRRLHSVENLNREISHRMAGLR | 441 |
| | MRSA | | |
| PF-163 | S. epidermidis | TSWLRAAERQEIGEPTKTFGEKTTSL | 442 |
| PF-164 | S. epidermidis | EEVSRALAGIGLGLGCRIG | 443 |
| | M. luteus | | |
| | E. coli | | |
| | C. jeikeium | | |
| PF-165 | MRSA | GPVSVVASLRRGTTVQRHSQNNHNKG | 444 |
| | C. jejuni | KP | |
| PF-166 | E. coli | SKAVSRKRSI | 445 |
| | C. jeikeium | | |
| PF-167 | S. epidermidis | AIEGVIKKGACFKLLRHEMF | 446 |
| | E. coli | | |
| | C. albicans | | |
| | MRSA | | |
| | C. jeikeium | | |
| | C. jejuni | | |
| PF-168 | S. epidermidis | VLPFPAIPLSRRRACVAAPRPRSRQRAS | 447 |
| | M. luteus | | |
| | E. coli | | |
| | C. albicans | | |
| | MRSA | | |
| | C. jeikeium | | |
| | C. jejuni | | |
| PF-169 | S. epidermidis | APGSAADSPRSRADD | 448 |
| | E. coli | | |
| | C. albicans | | |
| | E. faecalis | | |
| | C. jeikeium | | |
| PF-170 | S. epidermidis | RLARGRPTNLCGRRG | 449 |
| | M. luteus | | |
| | P. mirabilis | | |
| | E. coli | | |
| | P. aeruginosa | | |
| | C. albicans | | |
| | MRSA | | |
| | S. pneumoniae | | |
| | E. faecalis | | |
| | C. jejuni | | |
| PF-171 | S. epidermidis | TQVTLCRTW | 450 |
| | E. coli | | |
| | P. aeruginosa | | |
| | S. pneumoniae | | |
| PF-172 | S. epidermidis | LTGVRRPWRAPWAGTSGWALR | 451 |
| | M. luteus | | |
| | E. coli | | |
| | P. aeruginosa | | |
| | MRSA | | |
| | E. faecalis | | |
| | C. jejuni | | |
| PF-173 | S. epidermidis | AGRTAIVQGGG | 452 |
| | M. luteus | | |
| | P. mirabilis | | |
| | E. coli | | |
| | P. aeruginosa | | |
| | C. albicans | | |
| | C. jeikeium | | |
| | C. jejuni | | |
| PF-174 | S. epidermidis | RGGDSPARRRPGLAGPGGPG | 453 |
| | P. aeruginosa | | |
| | C. jeikeium | | |
| PF-175 | S. epidermidis | RRRPAGQRPEKASQAMIAA | 454 |
| | E. faecalis | | |
| PF-176 | S. epidermidis | RLTSNQFLTRITPFVFAQH | 455 |
| | M. luteus | | |
| | P. mirabilis | | |
| | E. coli | | |
| | C. albicans | | |
| | MRSA | | |
| | E. faecalis | | |
| | C. jeikeium | | |
| PF-177 | M. luteus | VTSEPGIAHDIRLLPRAAAFR | 456 |
| | MRSA | | |
| | E. faecalis | | |
| | C. jeikeium | | |
| PF-178 | S. epidermidis | EVYSSPTNNVAITVQNN | 457 |
| | M. luteus | | |
| | B. subtilis | | |
| | P. mirabilis | | |
| | E. coli | | |
| | P. aeruginosa | | |
| | C. albicans | | |
| | MRSA | | |
| | S. pneumoniae | | |
| | E. faecalis | | |
| | C. jeikeium | | |
| PF-180 | S. epidermidis | SGLGDLGFSSEAK | 458 |
| | M. luteus | | |
| | P. aeruginosa | | |
| | C. albicans | | |
| | MRSA | | |
| | E. faecalis | | |
| | C. jejuni | | |
| | M. smegmatis | | |
| PF-181 | S. epidermidis | GIAPRRNEWGAVGGR | 459 |
| | M. luteus | | |
| | E. coli | | |
| | MRSA | | |
| | E. faecalis | | |
| | C. jeikeium | | |
| PF-182 | S. epidermidis | LPATRDKTRVPASVAGAP | 460 |
| | M. luteus | | |
| | E. coli | | |
| | E. faecalis | | |
| | C. jeikeium | | |
| PF-183 | S. epidermidis | KPGISVENRQ | 461 |
| | M. luteus | | |
| | E. coli | | |
| | C. albicans | | |
| | MRSA | | |
| | E. faecalis | | |
| | C. jeikeium | | |
| PF-184 | S. epidermidis | LIADRHIRA | 462 |
| | M. luteus | | |
| | E. coli | | |
| | P. aeruginosa | | |
| | C. albicans | | |
| | MRSA | | |
| | C. jeikeium | | |
| PF-185 | E. coli | RPAQARQGPGGLIADRHIRA | 463 |
| | P. aeruginosa | | |
| PF-186 | S. epidermidis | DADKNLSLERDRFAWRVAAP | 464 |
| | M. luteus | | |
| | E. coli | | |
| | P. aeruginosa | | |
| | MRSA | | |
| | C. jeikeium | | |
| PF-187 | S. epidermidis | EIQKIAKGVSGQVYGPSRQITISKKR | 465 |
| | M. luteus | | |
| | E. coli | | |
| | MRSA | | |
| PF-188 | S. epidermidis | ARTFAGRLGTRYFGGLMRSTKA | 466 |
| | M. luteus | | |
| | E. coli | | |
| | C. albicans | | |
| | MRSA | | |
| | E. faecalis | | |
| PF-189 | S. epidermidis | GNLTRSREAARATQ | 467 |
| | M. luteus | | |
| | C. albicans | | |
| | MRSA | | |
| | E. faecalis | | |
| | C. jejuni | | |
| PF-190 | S. epidermidis | HFILRKPLLFMIHSLKTGPLDRF | 468 |
| | M. luteus | | |
| | P. mirabilis | | |
| | E. coli | | |
| | P. aeruginosa | | |
| | C. albicans | | |
| | MRSA | | |
| | S. pneumoniae | | |
| | E. faecalis | | |
| | C. jeikeium | | |
| PF-191 | E. coli | QFCNFAWLFLASNNAQVSALA | 469 |
| | P. aeruginosa | | |
| | C. jejuni | | |
| PF-192 | S. epidermidis | VEEDEAPPPHY | 470 |
| | M. luteus | | |
| | P. aeruginosa | | |
| | C. albicans | | |
| | E. faecalis | | |
| | C. jeikeium | | |
| PF-193 | S. epidermidis | PPHCPPGHAKKGWC | 471 |
| | M. luteus | | |
| | E. coli | | |
| | MRSA | | |
| | E. faecalis | | |
| | C. jejuni | | |
| PF-194 | C. jeikeium | MKGNKLATAHEQPVKNSAPPL | 472 |
| PF-195 | S. epidermidis | EMAEGSADDRLRKTPRDC | 473 |
| | M. luteus | | |
| | E. faecalis | | |
| | C. jeikeium | | |
| PF-196 | S. epidermidis | TTARYIRRQCHTSITPLSQG | 474 |
| | M. luteus | | |
| | P. mirabilis | | |
| | E. coli | | |
| | P. aeruginosa | | |
| | C. albicans | | |
| | MRSA | | |
| | S. pneumoniae | | |
| | E. faecalis | | |
| | C. jejuni | | |
| PF-197 | S. epidermidis | CNALLRRGHPPSAL | 475 |
| | M. luteus | | |
| | C. albicans | | |
| | E. faecalis | | |
| | C. jejuni | | |
| PF-200 | S. epidermidis | GIELKSLIMAQIERWRQA | 476 |
| | M. luteus | | |
| | MRSA | | |
| | E. faecalis | | |
| | C. jeikeium | | |
| PF-201 | S. epidermidis | GCRPASLSDADPDGR | 477 |
| | M. luteus | | |
| | E. coli | | |
| | C. albicans | | |
| | E. faecalis | | |
| | C. jeikeium | | |
| | C. jejuni | | |
| PF-202 | S. epidermidis | ALNRASLRLALGE | 478 |
| | M. luteus | | |
| | E. coli | | |
| | MRSA | | |
| | E. faecalis | | |
| | C. jeikeium | | |
| | C. jejuni | | |
| PF-203 | S. epidermidis | SWKCHHLAI | 479 |
| | M. luteus | | |
| | P. mirabilis | | |
| | E. coli | | |
| | P. aeruginosa | | |
| | C. albicans | | |
| | MRSA | | |
| | S. pneumoniae | | |
| | E. faecalis | | |
| | C. jejuni | | |
| PF-204 | S. epidermidis | ALQKQDMNLPSVKNQLVFLKSTG | 480 |
| | P. mirabilis | | |
| | E. coli | | |
| | P. aeruginosa | | |
| | C. albicans | | |
| | C. jejuni | | |
| PF-205 | S. epidermidis | AGVLETPRCRGEYGAN | 481 |
| | M. luteus | | |
| | E. coli | | |
| | P. aeruginosa | | |
| | C. albicans | | |
| | MRSA | | |
| | E. faecalis | | |
| | C. jeikeium | | |
| | C. jejuni | | |
| PF-206 | M. luteus | KLRSASKKSLQEKSCGIMPEKPAG | 482 |
| | C. albicans | | |
| | C. jeikeium | | |
| | C. jejuni | | |
| PF-207 | M. luteus | AAGCRDLGSLSSLVTNPS | 483 |
| | C. jeikeium | | |
| PF-208 | S. epidermidis | DAYHCHLVRSPDAHDLSMRIGFV | 484 |
| | C. albicans | | |
| | MRSA | | |
| | S. pneumoniae | | |
| | E. faecalis | | |
| | C. jeikeium | | |
| | C. jejuni | | |
| PF-209 | C. albicans | NYAVVSHT | 485 |
| | C. jeikeium | | |
| | C. jejuni | | |
| PF-210 | S. epidermidis | EREDGCDAMPLP | 486 |
| | P. aeruginosa | | |
| | C. albicans | | |
| | MRSA | | |
| | E. faecalis | | |
| | C. jeikeium | | |
| | C. jejuni | | |
| PF-211 | S. epidermidis | DSFDSLSPFRERGGEREDGCDAMPLP | 487 |
| | M. luteus | | |
| | E. coli | | |
| | P. aeruginosa | | |
| | C. albicans | | |
| | S. pneumoniae | | |
| | E. faecalis | | |
| | C. jeikeium | | |
| | C. jejuni | | |
| | M. smegmatis | | |
| PF-212 | M. luteus | NDSKASN | 488 |
| | P. aeruginosa | | |
| PF-213 | S. epidermidis | MTTGVDFIIEKV | 489 |
| PF-214 | S. mutans | GHLRVCWVFSASLLTPFRSATLI | 490 |
| | S. epidermidis | | |
| | M. luteus | | |
| | E. coli | | |
| | P. aeruginosa | | |
| | A. baumannii | | |
| PF-215 | S. epidermidis | ELKITNYNVNTVLYRYYKWGNDLCE | 491 |
| | M. luteus | | |
| | P. aeruginosa | | |
| | A. baumannii | | |
| PF-216 | S. mutans | ESVDKITEALEEDGFPAKVQ | 492 |
| | E. coli | | |
| PF-217 | S. mutans | DWEFTHKTIPQKK | 493 |
| PF-218 | S. epidermidis | SETPEKPVGTFFYSIYYKIIL | 494 |
| | M. luteus | | |
| | P. aeruginosa | | |
| | A. baumannii | | |
| PF-219 | S. epidermidis | FLALAVIAGLFKVILIYAAPYLK | 495 |
| | M. luteus | | |
| | P. aeruginosa | | |
| | A. baumannii | | |
| PF-221 | S. epidermidis | VFDNIDINF | 496 |
| | M. luteus | | |
| | P. aeruginosa | | |
| PF-222 | S. epidermidis | HIKETR | 497 |
| PF-223 | S. epidermidis | VKFCIECQTKLERKRR | 498 |
| | M. luteus | | |
| | A. baumannii | | |
| PF-224 | S. epidermidis | DYFYITLSQKNTF | 499 |
| | P. aeruginosa | | |
| | A. baumannii | | |
| PF-225 | S. epidermidis | MNCASPEFKKLMELYK | 500 |
| PF-226 | A. baumannii | LMFFSENMDKRDTLSGKFRYFAGSKVI | 501 |
| | | KLMNWLSENGK | |
| PF-228 | S. mutans | NQLGSQAFAQL | 502 |
| PF-229 | S. epidermidis | DPILIQIGFTRFALRKAEAEKIEIQVEEGV | 503 |
| | M. luteus | PA | |
| | P. aeruginosa | | |
| | A. baumannii | | |
| PF-230 | S. mutans | EDKPTNTIQEIKPVKWQ | 504 |
| PF-231 | S. mutans | AVRDFKKSVREEDEAASLNSPRTIDAQ | 505 |
| | | VKTSESTSVKS | |
| PF-232 | S. epidermidis | FDQLYALEREGKLDELLA | 506 |
| | M. luteus | | |
| PF-233 | S. epidermidis | DANAMARTTIAIVYILALIALTISYSL | 507 |
| | M. luteus | | |
| | P. aeruginosa | | |
| | A. baumannii | | |
| PF-234 | S. epidermidis | RTPYILRS | 508 |
| | M. luteus | | |
| PF-235 | S. epidermidis | GIPFSKPHKRQVNYMKSDVLAYIEQNK | 509 |
| | M. luteus | MAHTA | |
| PF-236 | S. mutans | KEIRTATVAELNAKRRLTSAEQALAEVS | 510 |
| | S. epidermidis | | |
| | E. coli | | |
| | C. albicans | | |
| | S. pneumoniae | | |
| | E. faecalis | | |
| PF-237 | S. epidermidis | YVKPKVGVHE | 511 |
| PF-238 | S. mutans | RNAVVVTEATFPKYEEEITNYLNRRFGE | 512 |
| | S. epidermidis | DWSLKLEKCSVA | |
| | E. coli | | |
| | P. aeruginosa | | |
| | C. albicans | | |
| | MRSA | | |
| | S. pneumoniae | | |
| | E. faecalis | | |
| PF-239 | S. mutans | PKHNVVTGVSVDLDYKP | 513 |
| | E. coli | | |
| PF-240 | S. mutans | RITEVPPDEHSDR | 514 |
| | E. coli | | |
| PF-242 | S. mutans | KLFEDPLIKSKAVENFQTTWHEQCLAK | 515 |
| | E. coli | ELAKNM | |
| PF-244 | S. epidermidis | HMRTISYLLAFAKFSLFIPPKQSLKRL | 516 |
| | M. luteus | | |
| | P. aeruginosa | | |
| | A. baumannii | | |
| PF-245 | S. epidermidis | MNDVKPVVQPKQTLKAFLVQLLSVRA | 517 |
| | M. luteus | GVYIKQNNQLPKTKG | |
| | P. aeruginosa | | |
| | A. baumannii | | |
| PF-246 | S. mutans | QPDEKAEFFDPSLDKVYRHPTFYHIPDG | 518 |
| | | IEHM | |
| PF-247 | S. epidermidis | ETAASETH | 519 |
| PF-248 | S. mutans | ILSKLWFWMINSLGVVLLVSYWLLAK | 520 |
| | S. epidermidis | WGVA | |
| | M. luteus | | |
| | E. coli | | |
| | P. aeruginosa | | |
| | A. baumannii | | |
| PF-249 | S. epidermidis | INSRYKISF | 521 |
| | M. luteus | | |
| PF-252 | S. mutans | MKKLVAALAVIVILTGCVYDPVNYDKI | 522 |
| | | HDQEFQDHLRQNG | |
| PF-253 | S. epidermidis | VRDDDS | 523 |
| | M. luteus | | |
| PF-254 | S. epidermidis | FIYGVGFVPHFWLWKWLFSPWIAWPL | 524 |
| | M. luteus | MLLGYYIWFLT | |
| | P. aeruginosa | | |
| | A. baumannii | | |
| PF-255 | P. aeruginosa | DHKINESQHNPFRSDSNKQNVDFF | 525 |
| PF-256 | S. epidermidis | EYFKQVYVKNEKIYSFWICKDLSPKEA | 526 |
| | | AKRAEDILVKLK | |
| PF-257 | S. epidermidis | VWENRKKYLENEIERHNVFLKLGQEVI | 527 |
| | | KGLNALASRGR | |
| PF-259 | S. epidermidis | LPFSKIGRRVSYKKKDVLKYEQSKTVL | 528 |
| | P. aeruginosa | NTAQLATV | |
| | A. baumannii | | |
| PF-262 | S. mutans | DPHSEIDVTRYCQLHHFTCQTMQISERE | 529 |
| | S. epidermidis | FHYLIETQ | |
| | M. luteus | | |
| | E. coli | | |
| | P. aeruginosa | | |
| | A. baumannii | | |
| PF-263 | S. epidermidis | NLKKCPC | 530 |
| | M. luteus | | |
| | A. baumannii | | |
| PF-265 | S. epidermidis | MKTLFFPLFLIIFVLIIQALDQSYQKKIGI | 531 |
| | M. luteus | SKPQKHPEFMQ | |
| | A. baumannii | | |
| PF-266 | S. mutans | DQEKKNKTEESTEQ | 532 |
| PF-267 | M. luteus | SDDKRTD | 533 |
| PF-268 | S. mutans | EVLLSDLRPDIFSET | 534 |
| PF-270 | S. epidermidis | MYLTPYAWIAVGSIFAFSVTTIKIGDQN | 535 |
| | M. luteus | DEKQKSHKNDVHKR | |
| | P. aeruginosa | | |
| PF-271 | S. epidermidis | AAQPQTTSP | 536 |
| | M. luteus | | |
| | P. aeruginosa | | |
| | A. baumannii | | |
| PF-273 | S. epidermidis | LVGALLIFVALIYMVLKGNADKN | 537 |
| | M. luteus | | |
| | P. aeruginosa | | |
| | A. baumannii | | |
| PF-275 | S. mutans | LVSGVANTVKNTAHTVGNTAKHAGHV | 538 |
| | | AADTTVKATKKQQVK | |
| PF-276 | S. epidermidis | LDLALSTNSLNLEGFSF | 539 |
| PF-278 | M. luteus | LSLATFAKIFMTRSNWSLKRFNRL | 540 |
| | A. baumannii | | |
| PF-279 | S. mutans | SHIGFISISACLAVLLGIARLFVWTWVKF | 541 |
| | S. epidermidis | FA | |
| | M. luteus | | |
| | E. coli | | |
| | P. aeruginosa | | |
| | A. baumannii | | |
| PF-281 | S. mutans | SYNTYYNKLIHGQRTPDGM | 542 |
| | E. coli | | |
| PF-282 | S. mutans | QNNDTSAWCGSAHKNGNS | 543 |
| PF-283 | B. subtilis | MIRIRSPTKKKLNRNSISDWKSNTSGRF | 544 |
| | B. fragilis | FY | |
| | C. difficile | | |
| PF-284 | C. difficile | MRYITYSLIPRLLSKKVIHQQ | 545 |
| PF-285 | S. mutans | VPAKLLRVIDEIPE | 546 |
| PF-288 | S. mutans | IYQLLNIEYSEDD | 547 |
| | E. coli | | |
| PF-289 | C. difficile | MGRHLWNPSYFVATVSENTEEQIRKYR | 548 |
| | | KNK | |
| PF-291 | S. mutans | DVDGAIESEL | 549 |
| | E. coli | | |
| PF-292 | S. epidermidis | SFVSTTVRLIFEESKRYKF | 550 |
| | B. subtilis | | |
| | B. fragilis | | |
| PF-294 | S. epidermidis | DFLVNFLWFKGELNWGKKRYK | 551 |
| | C. difficile | | |
| PF-295 | C. difficile | NIQVYESECGNYIFKKSDESFLIDIFDKN | 552 |
| | | GTH | |
| PF-297 | S. epidermidis | ISKGIDDIVYVINKILSIGNIFKIIKRK | 553 |
| | B. subtilis | | |
| | B. fragilis | | |
| PF-299 | B. subtilis | LATKLKYEKEHKKM | 554 |
| PF-300 | B. subtilis | VKDVLLELFNKIIGA | 555 |
| | C. difficile | | |
| PF-301 | C. difficile | GIVLIGLKLIPLLANVLN | 556 |
| PF-304 | S. mutans | LVKDTSDIKNDLNNIEIVTSKNSNDIAKL | 557 |
| | | KSVK | |
| PF-305 | C. difficile | MREWICPSCNETHDRDINASINILKEGL | 558 |
| | | RLITIQNK | |
| PF-306 | C. difficile | GCILPHKKDNYNYIMSKFQDLVKITSKK | 559 |
| PF-307 | S. epidermidis | MKRRRCNWCGKLFYLEEKSKEAYCCK | 560 |
| | B. subtilis | ECRKKAKKVKK | |
| | B. fragilis | | |
| | C. difficile | | |
| PF-308 | C. difficile | QQYLILDRM | 561 |
| PF-309 | S. mutans | GIPGMTAAPAEENEQEENADEE | 562 |
| | E. coli | | |
| PF-311 | C. difficile | IDAVTKKKTTCMIRAPTKIPIAHTDN | 563 |
| PF-313 | S. epidermidis | YITSHKNARAIIKKFERDEILEEVITHYL | 564 |
| | C. difficile | NRK | |
| PF-314 | S. mutans | ECLKKAIKSKALNKAFKIDVPDEVYDN | 565 |
| | | LLMELEEYEK | |
| PF-317 | S. mutans | LILVSDI | 566 |
| PF-319 | S. epidermidis | SIGSMIGMYSFRHKTKHIKFTFGIPFILFL | 567 |
| | B. subtilis | QFLLVYFYILK | |
| | C. difficile | | |
| PF-320 | S. mutans | DSGYYALLENKEERVVWDGEVVANNI | 568 |
| | E. coli | FNNLWIVVNKVKTG | |
| PF-323 | S. mutans | ARESIEKSHVPVDATIVGVVDSFEVFDE | 569 |
| PF-324 | C. difficile | HFSLL | 570 |
| PF-325 | S. mutans | LTIDEKLRNHR | 571 |
| | E. coli | | |
| PF-326 | S. mutans | VIVGNLGAQKEKRNDTPISAKKDIMGD | 572 |
| | E. coli | KTVRVRADLHH | |
| PF-328 | S. mutans | NGNEKAFSEVENLVK | 573 |
| PF-329 | S. epidermidis | IGILFDKSVRKY | 574 |
| PF-333 | S. mutans | YMTKKLVEMAEQQMAGKSNR | 575 |
| PF-334 | S. epidermidis | QQYLILDRM | 576 |
| | C. difficile | | |
| PF-336 | S. mutans | MLTSRKKRLKKIVEEQNKKDESI | 577 |
| | E. coli | | |
| PF-337 | S. epidermidis | YMTKKLVEMAERQMAGK | 578 |
| PF-338 | S. mutans | KGTSCPDQLSKAIRQSI | 579 |
| PF-340 | S. mutans | VKDVLLELFNKIIGA | 580 |
| | E. coli | | |
| PF-344 | B. subtilis | DERLPEAKAIRNFNGSVMVLGR | 581 |
| | C. jejuni | | |
| PF-347 | S. epidermidis | GIFTGVTVVVSLKHC | 582 |
| | B. subtilis | | |
| | B. fragilis | | |
| | E. coli | | |
| | P. aeruginosa | | |
| | C. albicans | | |
| | MRSA | | |
| | S. pneumoniae | | |
| | E. faecalis | | |
| PF-348 | B. subtilis | ESASAAEWYNPNMNVKKAICMG | 583 |
| | E. coli | | |
| | P. aeruginosa | | |
| | C. albicans | | |
| | E. faecalis | | |
| | C. jejuni | | |
| PF-349 | S. epidermidis | MPKSCHVPVLCDFFFLVIIKFLALFKTIQS | 584 |
| | B. subtilis | | |
| | B. fragilis | | |
| | E. coli | | |
| | P. aeruginosa | | |
| | C. albicans | | |
| | MRSA | | |
| | S. pneumoniae | | |
| | E. faecalis | | |
| | C. jeikeium | | |
| PF-350 | S. epidermidis | LAVILRAIVY | 585 |
| | E. coli | | |
| | E. faecalis | | |
| | C. jeikeium | | |
| | C. jejuni | | |
| PF-351 | S. mutans | YLFFKGKKVAEEEATKDEVKR | 586 |
| PF-352 | C. jeikeium | RVKKIG | 587 |
| PF-353 | S. epidermidis | EKTNFKGVKRNFYKKASFFV | 588 |
| | M. luteus | | |
| | B. subtilis | | |
| | E. coli | | |
| | C. albicans | | |
| | S. pneumoniae | | |
| | E. faecalis | | |
| | C. jeikeium | | |
| | C. jejuni | | |
| PF-354 | S. epidermidis | FTFSKCRASNGRGFGTLWL | 589 |
| | B. subtilis | | |
| | E. coli | | |
| | P. aeruginosa | | |
| | C. albicans | | |
| | MRSA | | |
| | S. pneumoniae | | |
| | E. faecalis | | |
| | C. jeikeium | | |
| | C. jejuni | | |
| PF-355 | S. epidermidis | WIAIGLLLYFSLKNQ | 590 |
| | B. subtilis | | |
| | B. fragilis | | |
| | E. coli | | |
| | P. aeruginosa | | |
| | C. albicans | | |
| | MRSA | | |
| | S. pneumoniae | | |
| | E. faecalis | | |
| | C. jeikeium | | |
| PF-356 | S. epidermidis | VSIKIGAIVIGMIGLMELLTE | 591 |
| | B. subtilis | | |
| | B. fragilis | | |
| | E. coli | | |
| | P. aeruginosa | | |
| | C. albicans | | |
| | MRSA | | |
| | S. pneumoniae | | |
| | E. faecalis | | |
| | C. jeikeium | | |
| PF-357 | S. epidermidis | MLTIIIGFIFWTMTLMLGYLIGEREGRK | 592 |
| | M. luteus | HE | |
| | P. mirabilis | | |
| | E. coli | | |
| | P. aeruginosa | | |
| | C. albicans | | |
| | MRSA | | |
| | S. pneumoniae | | |
| | E. faecalis | | |
| | C. jeikeium | | |
| PF-358 | S. epidermidis | RNTAHNIKWRSKN | 593 |
| | B. subtilis | | |
| | E. coli | | |
| | C. albicans | | |
| | MRSA | | |
| | S. pneumoniae | | |
| | E. faecalis | | |
| | C. jeikeium | | |
| | C. jejuni | | |
| PF-359 | S. epidermidis | MTVMEDPGSEQRNKIQSPMKGEDFSAL | 594 |
| | B. fragilis | FGR | |
| | P. aeruginosa | | |
| | C. albicans | | |
| | MRSA | | |
| | E. faecalis | | |
| | C. jeikeium | | |
| PF-360 | S. epidermidis | MEQKVKVIFVPRSKPDNQLKTFVSAVL | 595 |
| | B. subtilis | FKA | |
| | E. coli | | |
| | P. aeruginosa | | |
| | C. albicans | | |
| | E. faecalis | | |
| | C. jeikeium | | |
| | C. jejuni | | |
| PF-361 | S. epidermidis | NQVTEGIRLLVE | 596 |
| | E. coli | | |
| | E. faecalis | | |
| | C. jejuni | | |
| PF-362 | S. epidermidis | NIERILKEKVWMIRCVE | 597 |
| | E. coli | | |
| | P. aeruginosa | | |
| | C. albicans | | |
| | E. faecalis | | |
| | C. jejuni | | |
| PF-363 | B. subtilis | SMLSVTVMCLMHASVAANQAMEKKV | 598 |
| | E. coli | | |
| | P. aeruginosa | | |
| | C. albicans | | |
| | S. pneumoniae | | |
| | E. faecalis | | |
| PF-364 | S. epidermidis | LVNGIKI | 599 |
| | B. fragilis | | |
| | P. aeruginosa | | |
| | C. jeikeium | | |
| | C. jejuni | | |
| PF-365 | S. epidermidis | LYKQKIQLEEELEKLKDDRQ | 600 |
| | B. subtilis | | |
| | B. fragilis | | |
| | P. aeruginosa | | |
| | C. albicans | | |
| PF-366 | S. epidermidis | ALCSVIKAIELGIINVHLQ | 601 |
| | M. luteus | | |
| | B. fragilis | | |
| | P. mirabilis | | |
| | E. coli | | |
| | P. aeruginosa | | |
| | C. albicans | | |
| | MRSA | | |
| | S. pneumoniae | | |
| | E. faecalis | | |
| | C. jeikeium | | |
| | C. jejuni | | |
| PF-367 | B. subtilis | TKTPGTFTPGTGIQKTAVPL | 602 |
| PF-368 | C. jeikeium | MLKQTA | 603 |
| | C. jejuni | | |
| PF-369 | B. subtilis | MSEAVNLLRGARYSQRYAKNQVPYEVI | 604 |
| | B. fragilis | IEK | |
| | E. coli | | |
| | P. aeruginosa | | |
| | C. albicans | | |
| | S. pneumoniae | | |
| | C. jeikeium | | |
| | C. jejuni | | |
| PF-370 | S. epidermidis | VIFLHKESGNLKEIFY | 605 |
| | E. coli | | |
| | P. aeruginosa | | |
| | E. faecalis | | |
| | C. jejuni | | |
| PF-371 | S. epidermidis | TFIYNEF | 606 |
| | B. fragilis | | |
| | C. jejuni | | |
| PF-372 | C. jeikeium | KKQDKRIEDKYKRMKKGD | 607 |
| | C. jejuni | | |
| PF-373 | S. epidermidis | HFYLLFER | 608 |
| | E. coli | | |
| | P. aeruginosa | | |
| | C. albicans | | |
| | MRSA | | |
| | E. faecalis | | |
| | C. jejuni | | |
| PF-374 | S. epidermidis | HLFFVKGMFILCQKNQINDE | 609 |
| | B. subtilis | | |
| | B. fragilis | | |
| | E. coli | | |
| | P. aeruginosa | | |
| | C. albicans | | |
| | MRSA | | |
| | S. pneumoniae | | |
| | E. faecalis | | |
| | C. jeikeium | | |
| | C. jejuni | | |
| PF-375 | S. epidermidis | MDSAKAQTMRTDWLAVSCLVASAYLR | 610 |
| | B. subtilis | SMLA | |
| | B. fragilis | | |
| | E. coli | | |
| | P. aeruginosa | | |
| | C. albicans | | |
| | S. pneumoniae | | |
| | E. faecalis | | |
| | C. jeikeium | | |
| | C. jejuni | | |
| PF-376 | S. epidermidis | MTVFEALMLAIAFATLIVKISNKNDKK | 611 |
| | B. subtilis | | |
| | B. fragilis | | |
| | E. coli | | |
| | P. aeruginosa | | |
| | C. albicans | | |
| | MRSA | | |
| | S. pneumoniae | | |
| | E. faecalis | | |
| | C. jeikeium | | |
| | C. jejuni | | |
| PF-378 | B. subtilis | ESAKSNLNFLMQEEWALFLLL | 612 |
| | B. fragilis | | |
| | E. coli | | |
| | P. aeruginosa | | |
| | C. jeikeium | | |
| PF-379 | S. epidermidis | VFVVLFIIYLASKLLTKLFPIKK | 613 |
| | B. subtilis | | |
| | B. fragilis | | |
| | E. coli | | |
| | P. aeruginosa | | |
| | C. albicans | | |
| | MRSA | | |
| | S. pneumoniae | | |
| | E. faecalis | | |
| | C. jeikeium | | |
| | C. jejuni | | |
| PF-380 | S. epidermidis | KKIIPLITLFVVTLVG | 614 |
| | B. subtilis | | |
| | B. fragilis | | |
| | E. coli | | |
| | P. aeruginosa | | |
| | C. albicans | | |
| | MRSA | | |
| | S. pneumoniae | | |
| | E. faecalis | | |
| | C. jeikeium | | |
| | C. jejuni | | |
| PF-381 | E. coli | QGANPCQQVGFTVNDPDCRLAKTV | 615 |
| | P. aeruginosa | | |
| | C. jejuni | | |
| PF-382 | S. epidermidis | KYKCSWCKRVYTLRKDHKTAR | 616 |
| | B. subtilis | | |
| | B. fragilis | | |
| | E. coli | | |
| | P. aeruginosa | | |
| | E. faecalis | | |
| | C. jeikeium | | |
| | C. jejuni | | |
| PF-383 | S. epidermidis | WSEIEINTKQSN | 617 |
| | B. subtilis | | |
| | B. fragilis | | |
| | E. coli | | |
| | C. jejuni | | |
| PF-384 | E. faecalis | HISKERFEAY | 618 |
| | C. jeikeium | | |
| | C. jejuni | | |
| PF-385 | S. epidermidis | MIKKSILKIKYYVPVLISLTLILSA | 619 |
| | E. coli | | |
| | P. aeruginosa | | |
| | C. albicans | | |
| | E. faecalis | | |
| PF-386 | S. epidermidis | FTLTLITTIVAILNYKDKKK | 620 |
| | B. subtilis | | |
| | B. fragilis | | |
| | E. coli | | |
| | P. aeruginosa | | |
| | C. albicans | | |
| | S. pneumoniae | | |
| | E. faecalis | | |
| | C. jeikeium | | |
| | C. jejuni | | |
| PF-387 | B. subtilis | GAVGIAFFAGNMKQDKRIADRQNKKSE | 621 |
| | E. coli | KK | |
| | P. aeruginosa | | |
| | E. faecalis | | |
| | C. jeikeium | | |
| | C. jejuni | | |
| PF-388 | E. faecalis | ITPLLDEIGKVCIDKISK | 622 |
| | C. jeikeium | | |
| | C. jejuni | | |
| PF-389 | S. epidermidis | GLQFKEIAEEFHITTTALQQWHKDNGY | 623 |
| | C. albicans | PIYNKNNRK | |
| | MRSA | | |
| | S. pneumoniae | | |
| | E. faecalis | | |
| | C. jeikeium | | |
| PF-390 | S. epidermidis | VVAYVITQVGAIRF | 624 |
| | P. aeruginosa | | |
| | C. albicans | | |
| | MRSA | | |
| PF-392 | S. epidermidis | DPAGCNDIVRKYCK | 625 |
| | B. subtilis | | |
| | S. pneumoniae | | |
| | C. jeikeium | | |
| | C. jejuni | | |
| PF-393 | S. epidermidis | DLVQSILSEFKKSG | 626 |
| | E. coli | | |
| | C. albicans | | |
| | MRSA | | |
| | S. pneumoniae | | |
| | C. jejuni | | |
| PF-394 | S. epidermidis | VLKEECYQKN | 627 |
| | MRSA | | |
| | C. jejuni | | |
| PF-395 | S. epidermidis | YCVPLGNMGNMNNKIW | 628 |
| | E. coli | | |
| | P. aeruginosa | | |
| | S. pneumoniae | | |
| | E. faecalis | | |
| | C. jeikeium | | |
| | C. jejuni | | |
| PF-396 | S. epidermidis | LIYTILASLGVLTVLQAILGREPKAVKA | 629 |
| | E. coli | | |
| | P. aeruginosa | | |
| | C. albicans | | |
| | E. faecalis | | |
| | C. jeikeium | | |
| PF-397 | S. epidermidis | VEDLMEDLNA | 630 |
| | MRSA | | |
| | S. pneumoniae | | |
| | E. faecalis | | |
| | C. jejuni | | |
| PF-398 | S. epidermidis | ILVVLAGILLVVLSYVGISKFKMNC | 631 |
| | B. subtilis | | |
| | B. fragilis | | |
| | E. coli | | |
| | P. aeruginosa | | |
| | C. albicans | | |
| | MRSA | | |
| | S. pneumoniae | | |
| | E. faecalis | | |
| | C. jeikeium | | |
| | C. jejuni | | |
| PF-399 | S. epidermidis | FPIISALLGAIICIAIYSFIVNRKA | 632 |
| | M. luteus | | |
| | P. mirabilis | | |
| | E. coli | | |
| | P. aeruginosa | | |
| | C. albicans | | |
| | MRSA | | |
| | S. pneumoniae | | |
| | E. faecalis | | |
| | C. jejuni | | |
| PF-400 | S. epidermidis | VIAWKFRNKFENSGV | 633 |
| | E. coli | | |
| | S. pneumoniae | | |
| | E. faecalis | | |
| | C. jeikeium | | |
| PF-401 | S. epidermidis | YWLSRVTTGHSFAFEKPVPLSLTIK | 634 |
| | E. coli | | |
| | P. aeruginosa | | |
| | MRSA | | |
| | E. faecalis | | |
| | C. jejuni | | |
| PF-402 | S. epidermidis | FIDVLKSKINEFLN | 635 |
| | P. aeruginosa | | |
| | E. faecalis | | |
| | C. jejuni | | |
| PF-403 | E. coli | LLSTEQLLKYYDGETFDGFQLPSNE | 636 |
| | P. aeruginosa | | |
| | S. pneumoniae | | |
| | E. faecalis | | |
| | C. jeikeium | | |
| | C. jejuni | | |
| PF-404 | S. epidermidis | VLYFQATVV | 637 |
| | E. coli | | |
| | P. aeruginosa | | |
| | E. faecalis | | |
| | C. jeikeium | | |
| | C. jejuni | | |
| PF-405 | S. epidermidis | LVRIEVDDLEEWYERNFI | 638 |
| | E. coli | | |
| | E. faecalis | | |
| PF-406 | E. coli | YLEMNADYLSNMDIFDELWEKYLENNK | 639 |
| | C. jejuni | | |
| PF-407 | S. epidermidis | KPKNKKEKTVISYEKLLSMY | 640 |
| | B. subtilis | | |
| | E. coli | | |
| | P. aeruginosa | | |
| | MRSA | | |
| | S. pneumoniae | | |
| | E. faecalis | | |
| | C. jeikeium | | |
| | C. jejuni | | |
| PF-408 | S. epidermidis | YCVPLGNMGNMNNKIW | 641 |
| | E. coli | | |
| | P. aeruginosa | | |
| | MRSA | | |
| | E. faecalis | | |
| | C. jeikeium | | |
| | C. jejuni | | |
| PF-409 | S. epidermidis | DLVQSILSEFKKSG | 642 |
| | MRSA | | |
| | C. jeikeium | | |
| | C. jejuni | | |
| PF-410 | S. epidermidis | FALELIALCRNLFIVYFP | 643 |
| | M. luteus | | |
| | B. fragilis | | |
| | P. mirabilis | | |
| | E. coli | | |
| | P. aeruginosa | | |
| | C. albicans | | |
| | MRSA | | |
| | S. pneumoniae | | |
| | E. faecalis | | |
| PF-411 | M. luteus | WVAVAILLNIALQTQLT | 644 |
| | B. subtilis | | |
| | B. fragilis | | |
| | P. mirabilis | | |
| | P. aeruginosa | | |
| | C. albicans | | |
| | MRSA | | |
| | S. pneumoniae | | |
| | E. faecalis | | |
| | C. jeikeium | | |
| | C. jejuni | | |
| PF-412 | M. luteus | TSGWLGQLEQ | 645 |
| | E. coli | | |
| | C. albicans | | |
| | C. jeikeium | | |
| | C. jejuni | | |
| PF-413 | P. aeruginosa | TFAGSIKIGVPDLVHVTFNCKR | 646 |
| | C. albicans | | |
| | C. jejuni | | |
| PF-414 | E. coli | LLNKKLE | 647 |
| | C. albicans | | |
| | C. jeikeium | | |
| PF-416 | S. pneumoniae | SKAGLYGKIERSDKRE | 648 |
| | C. jeikeium | | |
| PF-417 | S. epidermidis | DSYFRS | 649 |
| | C. jeikeium | | |
| | C. jejuni | | |
| PF-418 | S. epidermidis | FFLVHFYIRKRKGKVSIFLNYF | 650 |
| | M. luteus | | |
| | P. mirabilis | | |
| | E. coli | | |
| | P. aeruginosa | | |
| | C. albicans | | |
| | MRSA | | |
| | S. pneumoniae | | |
| | E. faecalis | | |
| | C. jeikeium | | |
| | C. jejuni | | |
| PF-421 | C. jeikeium | KHCFEITDKTDVV | 651 |
| PF-422 | C. albicans | MSRKKYENDEKSQKKLKIGRKSDVFYG | 652 |
| | MRSA | IID | |
| | C. jeikeium | | |
| PF-423 | S. epidermidis | AGKKERLLSFREQFLNKNKKK | 653 |
| | M. luteus | | |
| | E. coli | | |
| | S. pneumoniae | | |
| | E. faecalis | | |
| | C. jeikeium | | |
| PF-424 | S. epidermidis | IAAFVTSRAFSDTVSPI | 654 |
| | C. albicans | | |
| | MRSA | | |
| PF-425 | S. epidermidis | MMELVLKTIIGPIVVGVVLRIVDKWLN | 655 |
| | M. luteus | KDK | |
| | E. coli | | |
| | P. aeruginosa | | |
| | C. albicans | | |
| | MRSA | | |
| | S. pneumoniae | | |
| | C. jeikeium | | |
| PF-426 | S. epidermidis | MLQKYTQMISVTKCIITKNKKTQENVD | 656 |
| | E. coli | AYN | |
| | P. aeruginosa | | |
| | C. albicans | | |
| | MRSA | | |
| | S. pneumoniae | | |
| | E. faecalis | | |
| | C. jeikeium | | |
| PF-427 | M. luteus | YVLEYHGLRATQDVDAFMAL | 657 |
| | P. aeruginosa | | |
| | C. albicans | | |
| | C. jejuni | | |
| PF-428 | S. epidermidis | ENEESIF | 658 |
| | C. albicans | | |
| | E. faecalis | | |
| | C. jeikeium | | |
| PF-429 | S. epidermidis | AATLICVGSGIMSSL | 659 |
| | S. pneumoniae | | |
| | C. jeikeium | | |
| PF-430 | S. epidermidis | AVVCGYLAYTATS | 660 |
| | M. luteus | | |
| | E. coli | | |
| | S. pneumoniae | | |
| | E. faecalis | | |
| | C. jeikeium | | |
| | C. jejuni | | |
| PF-431 | S. epidermidis | VAYAAICWW | 661 |
| | M. luteus | | |
| | E. coli | | |
| | P. aeruginosa | | |
| | MRSA | | |
| | S. pneumoniae | | |
| | E. faecalis | | |
| | C. jeikeium | | |
| | C. jejuni | | |
| PF-432 | S. epidermidis | FNGDSEFFLCIAF | 662 |
| | M. luteus | | |
| | E. coli | | |
| | P. aeruginosa | | |
| | C. albicans | | |
| | MRSA | | |
| | S. pneumoniae | | |
| | E. faecalis | | |
| | C. jeikeium | | |
| | C. jejuni | | |
| PF-433 | S. epidermidis | MRKEFHNVLSSGQLLADKRPARDYNRK | 663 |
| | E. coli | | |
| | S. pneumoniae | | |
| | C. jeikeium | | |
| PF-434 | S. epidermidis | GQLLADKRPARDYNRK | 664 |
| | M. luteus | | |
| | S. pneumoniae | | |
| | C. jeikeium | | |
| PF-435 | C. jeikeium | MSRWDGHSDKGEAPAGKPPMHGFGLN | 665 |
| | | GENK | |
| PF-436 | C. jeikeium | KKHVLVGKQEKNG | 666 |
| PF-438 | S. epidermidis | QPYFQNQFKKITGYTPLQYRKEKR | 667 |
| | E. coli | | |
| | S. pneumoniae | | |
| | C. jeikeium | | |
| | C. jejuni | | |
| PF-439 | S. epidermidis | RVLVLKKFHGIMDGNRNVAVFFVGQ | 668 |
| | M. luteus | | |
| | B. fragilis | | |
| | P. mirabilis | | |
| | E. coli | | |
| | P. aeruginosa | | |
| | C. albicans | | |
| | MRSA | | |
| | S. pneumoniae | | |
| | E. faecalis | | |
| | C. jeikeium | | |
| | C. jejuni | | |
| PF-440 | S. epidermidis | MFIISPDLFNIAVILYILFFIHDILLLILS | 669 |
| | M. luteus | | |
| | P. mirabilis | | |
| | E. coli | | |
| | P. aeruginosa | | |
| | C. albicans | | |
| | MRSA | | |
| | S. pneumoniae | | |
| | E. faecalis | | |
| | C. jeikeium | | |
| | C. jejuni | | |
| PF-441 | C. jeikeium | TQVHKMARGIDPGPANGIYR | 670 |
| PF-442 | S. epidermidis | MQIFYIKTKIFLSFFLFLLIFSQCFYKIEE | 671 |
| | E. coli | | |
| | C. albicans | | |
| | S. pneumoniae | | |
| | E. faecalis | | |
| PF-443 | S. epidermidis | KLLYFFNYFENLQQVHLLVQL | 672 |
| | M. luteus | | |
| | P. mirabilis | | |
| | E. coli | | |
| | P. aeruginosa | | |
| | C. albicans | | |
| | S. pneumoniae | | |
| | E. faecalis | | |
| | C. jeikeium | | |
| | C. jejuni | | |
| PF-444 | M. luteus | MAAKLWEEGKMVYASSASMTKRLKL | 673 |
| | C. albicans | AMSKV | |
| | S. pneumoniae | | |
| | C. jeikeium | | |
| PF-445 | M. luteus | ASMTKRLKLAMSKV | 674 |
| | S. pneumoniae | | |
| | C. jeikeium | | |
| PF-446 | M. luteus | SGNEKV | 675 |
| | C. jeikeium | | |
| PF-447 | S. epidermidis | IDKSRNKDQFSHIFGLYNICSG | 676 |
| | M. luteus | | |
| | E. coli | | |
| | S. pneumoniae | | |
| PF-448 | S. epidermidis | SLQSQLGPCLHDQRH | 677 |
| | M. luteus | | |
| | P. mirabilis | | |
| | E. coli | | |
| | S. pneumoniae | | |
| | E. faecalis | | |
| | C. jeikeium | | |
| | C. jejuni | | |
| PF-450 | S. epidermidis | HRNLIILQRTIFI | 678 |
| | M. luteus | | |
| | E. coli | | |
| | P. aeruginosa | | |
| | C. albicans | | |
| | MRSA | | |
| | S. pneumoniae | | |
| | E. faecalis | | |
| | C. jeikeium | | |
| | C. jejuni | | |
| PF-451 | S. epidermidis | MVNYIIGSYMLYREQNNNEALRKFDIT | 679 |
| | M. luteus | LAM | |
| | E. coli | | |
| | P. aeruginosa | | |
| | C. albicans | | |
| | MRSA | | |
| | S. pneumoniae | | |
| | E. faecalis | | |
| | C. jeikeium | | |
| | C. jejuni | | |
| | M. smegmatis | | |
| PF-452 | M. luteus | MNNWIKVAQISVTVINEVIDIMKEKQN | 680 |
| | P. aeruginosa | GGK | |
| | C. albicans | | |
| | S. pneumoniae | | |
| | E. faecalis | | |
| | C. jeikeium | | |
| | M. smegmatis | | |
| PF-453 | M. luteus | IIQDIAHAFGY | 681 |
| | E. coli | | |
| | P. aeruginosa | | |
| | S. pneumoniae | | |
| | E. faecalis | | |
| | C. jeikeium | | |
| | C. jejuni | | |
| PF-454 | S. epidermidis | MSVFVPVTNIFMFIMSPIFNVNLLHFKV | 682 |
| | M. luteus | YI | |
| | E. coli | | |
| | P. aeruginosa | | |
| | C. albicans | | |
| | MRSA | | |
| | S. pneumoniae | | |
| | E. faecalis | | |
| | C. jeikeium | | |
| | C. jejuni | | |
| | M. smegmatis | | |
| PF-456 | C. albicans | TCVKPRTIN | 683 |
| | MRSA | | |
| | E. faecalis | | |
| | C. jeikeium | | |
| | C. jejuni | | |
| PF-457 | C. albicans | INKYHHIA | 684 |
| | S. pneumoniae | | |
| | E. faecalis | | |
| | C. jeikeium | | |
| PF-458 | S. epidermidis | ISLIIFIMLFVVALFKCITNYKHQS | 685 |
| | M. luteus | | |
| | E. coli | | |
| | P. aeruginosa | | |
| | C. albicans | | |
| | MRSA | | |
| | S. pneumoniae | | |
| | E. faecalis | | |
| | C. jeikeium | | |
| | C. jejuni | | |
| PF-459 | P. aeruginosa | EKRMSFNENQSHRPLL | 686 |
| PF-460 | S. epidermidis | MEHVLPFQNTPPNIVIIYKDFTHLKSITFS | 687 |
| | M. luteus | | |
| | P. mirabilis | | |
| | E. coli | | |
| | P. aeruginosa | | |
| | C. albicans | | |
| | MRSA | | |
| | S. pneumoniae | | |
| | E. faecalis | | |
| | C. jeikeium | | |
| | C. jejuni | | |
| | M. smegmatis | | |
| PF-461 | E. coli | MTLAIKNCSVTKCLGFGDFVNDDSDSY | 688 |
| | S. pneumoniae | FDA | |
| PF-462 | E. faecalis | KNKTDTL | 689 |
| | C. jeikeium | | |
| PF-463 | S. epidermidis | MVILVFSLIFIFTDNYLVYQSKSIKEDVMI | 690 |
| | E. coli | | |
| | P. aeruginosa | | |
| | C. albicans | | |
| | S. pneumoniae | | |
| | E. faecalis | | |
| | M. smegmatis | | |
| PF-464 | S. epidermidis | VDMVNRFLGN | 691 |
| | C. albicans | | |
| | MRSA | | |
| | S. pneumoniae | | |
| | E. faecalis | | |
| | C. jeikeium | | |
| | C. jejuni | | |
| PF-465 | S. epidermidis | KPVGKALEEIADGKIEPVVPKEYLG | 692 |
| | M. luteus | | |
| | E. coli | | |
| | P. aeruginosa | | |
| | C. albicans | | |
| | MRSA | | |
| | S. pneumoniae | | |
| | E. faecalis | | |
| | C. jeikeium | | |
| | C. jejuni | | |
| PF-466 | MRSA | VRKSDQ | 693 |
| | C. jeikeium | | |
| | C. jejuni | | |
| PF-467 | MRSA | YYKDYFKEI | 694 |
| | E. faecalis | | |
| | C. jeikeium | | |
| | C. jejuni | | |
| PF-469 | S. epidermidis | YKVNYNNIDNHFNTLRH | 695 |
| | M. luteus | | |
| | P. mirabilis | | |
| | E. coli | | |
| | C. albicans | | |
| | MRSA | | |
| | S. pneumoniae | | |
| | E. faecalis | | |
| | C. jeikeium | | |
| | C. jejuni | | |
| PF-470 | M. luteus | PYSDSYATRPHWEQHRAR | 696 |
| | E. coli | | |
| | MRSA | | |
| | E. faecalis | | |
| | C. jeikeium | | |
| | C. jejuni | | |
| PF-471 | S. epidermidis | MVGKIRGVTPRNDLLNANITGQLNLNY | 697 |
| | M. luteus | RLI | |
| | E. coli | | |
| | P. aeruginosa | | |
| | C. albicans | | |
| | MRSA | | |
| | S. pneumoniae | | |
| | E. faecalis | | |
| | C. jeikeium | | |
| | C. jejuni | | |
| PF-472 | S. epidermidis | MHISHLLDEVEQTEREKAVNVLENMNG | 698 |
| | E. coli | NVI | |
| | P. aeruginosa | | |
| | C. albicans | | |
| | MRSA | | |
| | S. pneumoniae | | |
| | E. faecalis | | |
| | C. jeikeium | | |
| PF-473 | S. epidermidis | MAADIISTIGDLVKWIIDTVNKFKK | 699 |
| | E. coli | | |
| | P. aeruginosa | | |
| | C. albicans | | |
| | MRSA | | |
| | S. pneumoniae | | |
| | E. faecalis | | |
| PF-474 | S. epidermidis | MHRNLVLVKMEPIPHIMIIANQIGIIIEKA | 700 |
| | M. luteus | | |
| | P. mirabilis | | |
| | E. coli | | |
| | P. aeruginosa | | |
| | C. albicans | | |
| | MRSA | | |
| | S. pneumoniae | | |
| | E. faecalis | | |
| | C. jeikeium | | |
| | C. jejuni | | |
| | M. smegmatis | | |
| PF-475 | S. epidermidis | MREKVRFTQAFKLFWTNYFNFKGRSRR | 701 |
| | M. luteus | SEY | |
| | P. mirabilis | | |
| | E. coli | | |
| | P. aeruginosa | | |
| | C. albicans | | |
| | MRSA | | |
| | S. pneumoniae | | |
| | E. faecalis | | |
| | C. jeikeium | | |
| | C. jejuni | | |
| PF-476 | M. luteus | WADAQYKLCENCSE | 702 |
| | P. mirabilis | | |
| | C. albicans | | |
| | S. pneumoniae | | |
| | E. faecalis | | |
| | C. jeikeium | | |
| | C. jejuni | | |
| PF-477 | S. epidermidis | HKNKLNIPHIKS | 703 |
| | M. luteus | | |
| | C. albicans | | |
| | S. pneumoniae | | |
| | C. jeikeium | | |
| | C. jejuni | | |
| PF-478 | S. epidermidis | HLFILKSHLKPFPPFRYTYD | 704 |
| | M. luteus | | |
| | P. mirabilis | | |
| | E. coli | | |
| | C. albicans | | |
| | S. pneumoniae | | |
| | E. faecalis | | |
| | C. jeikeium | | |
| | C. jejuni | | |
| PF-479 | S. epidermidis | AYILKRREEKNK | 705 |
| | M. luteus | | |
| | P. mirabilis | | |
| | E. coli | | |
| | C. albicans | | |
| | S. pneumoniae | | |
| | E. faecalis | | |
| | C. jeikeium | | |
| | C. jejuni | | |
| PF-480 | S. epidermidis | MVEILVNTAISVYIVALYTQWLSTRDNL | 706 |
| | M. luteus | KA | |
| | P. mirabilis | | |
| | E. coli | | |
| | P. aeruginosa | | |
| | C. albicans | | |
| | MRSA | | |
| | S. pneumoniae | | |
| | E. faecalis | | |
| | C. jeikeium | | |
| | C. jejuni | | |
| | M. smegmatis | | |
| PF-481 | C. jeikeium | DELYEIMDKVIEEFNKDIEQNNNNGNN | 707 |
| | | EDLTENKIN | |
| PF-482 | S. epidermidis | LVGYVRTSGTVRSYKIN | 708 |
| | M. luteus | | |
| | P. mirabilis | | |
| | E. coli | | |
| | P. aeruginosa | | |
| | C. albicans | | |
| | MRSA | | |
| | S. pneumoniae | | |
| | E. faecalis | | |
| | C. jeikeium | | |
| | C. jejuni | | |
| PF-483 | P. mirabilis | EDNKDKKDKKDK | 709 |
| | C. jeikeium | | |
| | C. jejuni | | |
| PF-484 | S. epidermidis | HKKDIRKQVFKN | 710 |
| | M. luteus | | |
| | P. mirabilis | | |
| | E. coli | | |
| | E. faecalis | | |
| | C. jeikeium | | |
| | C. jejuni | | |
| PF-486 | S. mutans | MQKEGEEDY | 711 |
| PF-487 | S. mutans | MYKAIAVLAMTIMAFFIFVYPFFIVGLILG | 712 |
| | E. coli | | |
| PF-488 | S. mutans | YPNEQGHHKNNLKNIIIE | 713 |
| | E. coli | | |
| PF-489 | S. mutans | KVDRVSTTITEKIK | 714 |
| PF-490 | S. mutans | RLILVSGNATVQK | 715 |
| | E. coli | | |
| PF-491 | S. mutans | IHQYSSKPDIVGQEAKTVQQINS | 716 |
| | E. coli | | |
| PF-492 | S. mutans | IQIDAASFYSISKSTIK | 717 |
| | B. subtilis | | |
| | E. coli | | |
| PF-493 | S. mutans | PGAFFFCRGRGCWCGIGW | 718 |
| | B. subtilis | | |
| | E. coli | | |
| PF-494 | S. mutans | FTEPLRPLQAKGQIISIKPSTSSS | 719 |
| PF-495 | S. mutans | KGIYKKRTY | 720 |
| | E. coli | | |
| PF-496 | S. mutans | EVTKRLVALAQQQLRG | 721 |
| | E. coli | | |
| PF-497 | S. mutans | LVLRICTDLFTFIKWTIKQRKS | 722 |
| | B. subtilis | | |
| | E. coli | | |
| PF-498 | S. mutans | MSEEEEVSEKVYNYLRRNEFFEVRKEE | 723 |
| | E. coli | FSA | |
| PF-499 | S. mutans | VYSFLYVLVIVRKLLSMKKRIERL | 724 |
| | E. coli | | |
| PF-500 | S. mutans | MGIFKEEKIKFIDCKGEEVILKIKIKDIKK | 725 |
| | E. coli | | |
| PF-501 | S. mutans | GSTAHKSPIGSTNNQWGMKKTPTD | 726 |
| PF-502 | S. mutans | NKGKQMQDQTGKQPIVDNG | 727 |
| PF-503 | S. mutans | VVTLKDIVAVIEDQGYDVQ | 728 |
| PF-504 | S. mutans | ILSVELSTKTSASGS | 729 |
| | E. coli | | |
| PF-505 | S. mutans | GYTKDPGTGI | 730 |
| PF-506 | S. mutans | SGRGFALIVVLFILLIIVGAACIR | 731 |
| | E. coli | | |
| PF-507 | S. mutans | LALSIANLFKKKA | 732 |
| | E. coli | | |
| PF-508 | S. mutans | VSTFGKVVKVVDEK | 733 |
| PF-509 | S. mutans | EAKVQAKGEQIACNNY | 734 |
| | B. subtilis | | |
| | E. coli | | |
| PF-510 | S. mutans | WYLYKKQSNQNDRGIPK | 735 |
| | E. coli | | |
| PF-511 | E. coli | VMQSLYVKPPLILVTKLAQQN | 736 |
| | P. aeruginosa | | |
| | S. pneumoniae | | |
| | C. jeikeium | | |
| PF-512 | S. pneumoniae | SFMPEIQKNTIPTQMK | 737 |
| | C. jeikeium | | |
| PF-513 | C. albicans | SNGVGLGVGIGSGIRF-NH2 | 738 |
| PF-514 | S. epidermidis | QRFYKLFYHIDLTNEQALKLFQVK | 739 |
| | E. coli | | |
| | P. aeruginosa | | |
| | C. albicans | | |
| | MRSA | | |
| | S. pneumoniae | | |
| | E. faecalis | | |
| | C. jeikeium | | |
| PF-515 | S. epidermidis | DKSTQDKDIKQAKLLAQELGL-NH2 | 740 |
| | C. albicans | | |
| | S. pneumoniae | | |
| | C. jeikeium | | |
| PF-517 | C. jejuni | VKPTMTASLISTVC | 741 |
| PF-518 | S. epidermidis | SFYSKYSRYIDNLAGAIFLFF | 742 |
| | E. coli | | |
| | P. aeruginosa | | |
| | C. albicans | | |
| | MRSA | | |
| | S. pneumoniae | | |
| | E. faecalis | | |
| PF-519 | M. luteus | YLVYSGVLATAAAF-NH2 | 743 |
| | E. faecalis | | |
| | C. jeikeium | | |
| PF-520 | S. epidermidis | LGLTAGVAYAAQPTNQPTNQPTNQPTN | 744 |
| | M. luteus | QPTNQPTNQPRW-NH2 | |
| | E. coli | | |
| | C. albicans | | |
| | MRSA | | |
| | S. pneumoniae | | |
| | E. faecalis | | |
| | C. jeikeium | | |
| | C. jejuni | | |
| PF-521 | S. epidermidis | CGKLLEQKNFFLKTR | 745 |
| | E. coli | | |
| | P. aeruginosa | | |
| | S. pneumoniae | | |
| | E. faecalis | | |
| PF-522 | S. epidermidis | FELVDWLETNLGKILKSKSA-NH2 | 746 |
| | E. coli | | |
| | P. aeruginosa | | |
| | S. pneumoniae | | |
| | E. faecalis | | |
| PF-523 | S. epidermidis | ASKQASKQASKQASKQASKQASRSLKN | 747 |
| | M. luteus | HLL | |
| | C. albicans | | |
| | S. pneumoniae | | |
| | C. jeikeium | | |
| | C. jejuni | | |
| PF-524 | S. epidermidis | PDAPRTCYHKPILAALSRIVVTDR | 748 |
| | E. coli | | |
| | P. aeruginosa | | |
| | C. albicans | | |
| | MRSA | | |
| | S. pneumoniae | | |
| | E. faecalis | | |
| | C. jeikeium | | |
| PF-526 | S. epidermidis | VLLLFIFQPFQKQLL-NH2 | 749 |
| | E. coli | | |
| | P. aeruginosa | | |
| | C. albicans | | |
| | MRSA | | |
| | S. pneumoniae | | |
| | E. faecalis | | |
| | C. jeikeium | | |
| | C. jejuni | | |
| PF-527 | S. epidermidis | GSVIKKRRKRMAKKKHRKLLKKTRIQR | 750 |
| | M. luteus | RRAGK | |
| | P. mirabilis | | |
| | E. coli | | |
| | P. aeruginosa | | |
| | MRSA | | |
| | S. pneumoniae | | |
| | E. faecalis | | |
| | C. jeikeium | | |
| | C. jejuni | | |
| PF-528 | S. epidermidis | LVDVVVLIRRHLPKSCS-NH2 | 751 |
| | P. aeruginosa | | |
| | C. albicans | | |
| | MRSA | | |
| | S. pneumoniae | | |
| | E. faecalis | | |
| PF-529 | S. epidermidis | LSEMERRRLRKRA-NH2 | 752 |
| | E. coli | | |
| | C. albicans | | |
| | MRSA | | |
| | S. pneumoniae | | |
| | E. faecalis | | |
| | C. jeikeium | | |
| PF-537 | S. epidermidis | LANDYYKKTKKSW | 753 |
| | M. luteus | | |
| | P. mirabilis | | |
| | E. coli | | |
| | C. albicans | | |
| | MRSA | | |
| | S. pneumoniae | | |
| | E. faecalis | | |
| | C. jeikeium | | |
| PF-539 | S. epidermidis | SIILTKKKRRKIPLSIDSQIYKYTFKQ | 754 |
| | M. luteus | | |
| | B. subtilis | | |
| | P. mirabilis | | |
| | E. coli | | |
| | P. aeruginosa | | |
| | C. albicans | | |
| | MRSA | | |
| | S. pneumoniae | | |
| | E. faecalis | | |
| | C. jeikeium | | |
| PF-540 | C. albicans | KSILILIKVIFIGQTTIIL | 755 |
| PF-542 | C. jeikeium | KKDNPSLNDQDKNAVLNLLALAK | 756 |
| PF-543 | S. epidermidis | NILFGIIGFVVAMTAAVIVTAISIAK | 757 |
| | M. luteus | | |
| | B. subtilis | | |
| | P. mirabilis | | |
| | E. coli | | |
| | P. aeruginosa | | |
| | C. albicans | | |
| | MRSA | | |
| | S. pneumoniae | | |
| | E. faecalis | | |
| | C. jeikeium | | |
| PF-544 | S. epidermidis | FGEKQMRSWWKVHWFHP | 758 |
| | M. luteus | | |
| | P. mirabilis | | |
| | P. aeruginosa | | |
| | MRSA | | |
| | S. pneumoniae | | |
| | E. faecalis | | |
| | C. jeikeium | | |
| | C. jejuni | | |
| PF-545 | S. epidermidis | RESKLIAMADMIRRRI-NH2 | 759 |
| | E. coli | | |
| | P. aeruginosa | | |
| | S. pneumoniae | | |
| | E. faecalis | | |
| | C. jeikeium | | |
| PF-546 | S. epidermidis | PIIAPTIKTQIQ | 760 |
| | E. coli | | |
| | C. albicans | | |
| | S. pneumoniae | | |
| | E. faecalis | | |
| | C. jeikeium | | |
| PF-547 | S. epidermidis | WSRVPGHSDTGWKVWHRW-NH2 | 761 |
| | E. coli | | |
| | P. aeruginosa | | |
| | C. albicans | | |
| | MRSA | | |
| | S. pneumoniae | | |
| | E. faecalis | | |
| PF-548 | M. luteus | ARPIADLIHFNSTTVTASGDVYYGPG | 762 |
| | P. mirabilis | | |
| | E. coli | | |
| | P. aeruginosa | | |
| | C. albicans | | |
| | S. pneumoniae | | |
| | E. faecalis | | |
| | C. jeikeium | | |
| | C. jejuni | | |
| PF-549 | E. coli | TGIGPIARPIEHGLDS | 763 |
| | C. albicans | | |
| | S. pneumoniae | | |
| | C. jeikeium | | |
| PF-550 | S. pneumoniae | STENGWQEFESYADVGVDPRRYVPL | 764 |
| PF-551 | S. pneumoniae | QVKEKRREIELQFRDAEKKLEASVQAE | 765 |
| PF-552 | S. pneumoniae | ELDKADAALGPAKNLAPLDVINRS | 766 |
| PF-553 | S. epidermidis | LTIVGNALQQKNQKLLLNQKKITSLG | 767 |
| | E. coli | | |
| | P. aeruginosa | | |
| | C. albicans | | |
| | MRSA | | |
| | S. pneumoniae | | |
| | C. jeikeium | | |
| PF-554 | S. pneumoniae | AKNFLTRTAEEIGEQAVREGNINGP | 768 |
| PF-555 | MRSA | EAYMRFLDREMEGLTAAYNVKLFTEAIS | 769 |
| | S. pneumoniae | | |
| | C. jeikeium | | |
| PF-556 | S. epidermidis | SLQIRMNTLTAAKASIEAA | 770 |
| | M. luteus | | |
| | B. fragilis | | |
| | P. mirabilis | | |
| | E. coli | | |
| | P. aeruginosa | | |
| | C. albicans | | |
| | MRSA | | |
| | S. pneumoniae | | |
| | E. faecalis | | |
| PF-557 | S. pneumoniae | AANKAREQAAAEAKRKAEEQAR | 771 |
| PF-558 | S. epidermidis | ADAPPPLIVRYS | 772 |
| | E. coli | | |
| | C. albicans | | |
| | C. jeikeium | | |
| | C. jejuni | | |
| PF-559 | S. epidermidis | SRPGKPGGVSIDVSRDRQDILSNYP | 773 |
| | M. luteus | | |
| | C. albicans | | |
| | C. jeikeium | | |
| | C. jejuni | | |
| PF-560 | S. epidermidis | FGNPFRGFTLAMEADFKKRK | 774 |
| | M. luteus | | |
| | E. coli | | |
| | S. pneumoniae | | |
| | C. jeikeium | | |
| | C. jejuni | | |
| PF-562 | S. epidermidis | TPEQWLERSTVVVTGLLNRK | 775 |
| | M. luteus | | |
| | P. mirabilis | | |
| | E. coli | | |
| | P. aeruginosa | | |
| | C. albicans | | |
| | MRSA | | |
| | S. pneumoniae | | |
| | E. faecalis | | |
| | C. jeikeium | | |
| | C. jejuni | | |
| PF-563 | S. epidermidis | RPELDNELDVVQNSASLDKLQASYN | 776 |
| | M. luteus | | |
| | C. jeikeium | | |
| PF-564 | S. epidermidis | TIILNDQINSLQERLNKLNAETDRR | 777 |
| | C. albicans | | |
| | S. pneumoniae | | |
| | C. jeikeium | | |
| PF-566 | P. mirabilis | EAQQVTQQLGADFNAITTPTATKV | 778 |
| | S. pneumoniae | | |
| PF-567 | S. epidermidis | QQRVKAVDASLSQVSTQVSGAVASA | 779 |
| | P. aeruginosa | | |
| | C. albicans | | |
| | MRSA | | |
| | S. pneumoniae | | |
| | C. jeikeium | | |
| PF-568 | S. epidermidis | TQAVQVKTAQAQQQ | 780 |
| PF-569 | M. luteus | KSKISEYTEKEFLEFVEDIYTNNK | 781 |
| | P. mirabilis | | |
| | S. pneumoniae | | |
| | E. faecalis | | |
| | C. jeikeium | | |
| PF-570 | S. pneumoniae | KKFPTEESHIQAVLEFKKLTEHPSG | 782 |
| | C. jeikeium | | |
| PF-572 | S. epidermidis | WRASKGLPGFKAG | 783 |
| | M. luteus | | |
| | E. coli | | |
| | S. pneumoniae | | |
| | C. jeikeium | | |
| PF-573 | S. epidermidis | EKKLIVKLIDSIGKSHEEIVGAG | 784 |
| | S. pneumoniae | | |
| PF-575 | M. luteus | LNFRAENKILEKIHISLIDTVEGSA | 785 |
| | E. coli | | |
| | C. albicans | | |
| | MRSA | | |
| | S. pneumoniae | | |
| | E. faecalis | | |
| | C. jeikeium | | |
| PF-576 | M. luteus | AYSGELPEPLVRKMSKEQVRSVMGK | 786 |
| | P. mirabilis | | |
| | E. coli | | |
| | P. aeruginosa | | |
| | C. albicans | | |
| | S. pneumoniae | | |
| PF-577 | S. epidermidis | PFETRESFRVPVIGILGGWDYFMHP | 787 |
| | M. luteus | | |
| | P. mirabilis | | |
| | E. coli | | |
| | P. aeruginosa | | |
| | C. albicans | | |
| | MRSA | | |
| | S. pneumoniae | | |
| | E. faecalis | | |
| PF-578 | S. epidermidis | QKANLRIGFTYTSDSNVCNLTFALLGSK | 788 |
| | M. luteus | | |
| | P. mirabilis | | |
| | P. aeruginosa | | |
| | C. albicans | | |
| | MRSA | | |
| | S. pneumoniae | | |
| | E. faecalis | | |
| | C. jeikeium | | |
| PF-579 | S. epidermidis | MILVCAAVIWGRVLFILKFPIYFSIRLAFL | 789 |
| | M. luteus | | |
| | P. mirabilis | | |
| | E. coli | | |
| | P. aeruginosa | | |
| | C. albicans | | |
| | MRSA | | |
| | S. pneumoniae | | |
| | E. faecalis | | |
| | C. jeikeium | | |
| | C. jejuni | | |
| PF-580 | S. epidermidis | EILNNNQVIKELTMKYKTQFESNLGGW | 790 |
| | M. luteus | TARARR | |
| | E. coli | | |
| | P. aeruginosa | | |
| | C. albicans | | |
| | MRSA | | |
| | S. pneumoniae | | |
| | E. faecalis | | |
| | C. jeikeium | | |
| PF-581 | S. epidermidis | WTARARR | 791 |
| | M. luteus | | |
| | E. coli | | |
| | P. aeruginosa | | |
| | C. albicans | | |
| | MRSA | | |
| | S. pneumoniae | | |
| | E. faecalis | | |
| | C. jeikeium | | |
| PF-583 | S. epidermidis | KFQGEFTNIGQSYIVSASHMSTSLNTGK | 792 |
| | M. luteus | | |
| | E. coli | | |
| | P. aeruginosa | | |
| | C. albicans | | |
| | MRSA | | |
| | S. pneumoniae | | |
| | E. faecalis | | |
| | C. jeikeium | | |
| PF-584 | S. epidermidis | SYIKNLSNQKFLIAF | 793 |
| | M. luteus | | |
| | P. mirabilis | | |
| | C. albicans | | |
| | MRSA | | |
| | S. pneumoniae | | |
| | E. faecalis | | |
| | C. jeikeium | | |
| PF-585 | S. epidermidis | DYNHLLNVVQDWVNTN | 794 |
| | E. coli | | |
| | C. albicans | | |
| | MRSA | | |
| | S. pneumoniae | | |
| | C. jeikeium | | |
| PF-586 | S. epidermidis | FFNQANYFFKEF | 795 |
| | M. luteus | | |
| | E. coli | | |
| | P. aeruginosa | | |
| | MRSA | | |
| | S. pneumoniae | | |
| | E. faecalis | | |
| | C. jeikeium | | |
| | C. jejuni | | |
| PF-587 | S. epidermidis | ASGKYQSYLLNVYVDSKKDRLDIFDKL | 796 |
| | M. luteus | KAKAKFVL | |
| | E. coli | | |
| | MRSA | | |
| | S. pneumoniae | | |
| | E. faecalis | | |
| | C. jeikeium | | |
| PF-588 | S. epidermidis | ESVEAIKAKAIK | 797 |
| | E. coli | | |
| | C. albicans | | |
| | E. faecalis | | |
| | C. jeikeium | | |
| | C. jejuni | | |
| PF-589 | S. epidermidis | APLRIDEIRNSNVIDEVLDCAPKKQEHFF | 798 |
| | C. albicans | VVPKIIE | |
| | MRSA | | |
| | S. pneumoniae | | |
| PF-590 | S. epidermidis | YYQAKLFPLL | 799 |
| | M. luteus | | |
| | E. coli | | |
| | E. faecalis | | |
| | C. jeikeium | | |
| PF-592 | S. epidermidis | IMKNYKYFKLFIVKYALF | 800 |
| | M. luteus | | |
| | P. mirabilis | | |
| | E. coli | | |
| | P. aeruginosa | | |
| | C. albicans | | |
| | MRSA | | |
| | S. pneumoniae | | |
| | E. faecalis | | |
| | C. jeikeium | | |
| | C. jejuni | | |
| PF-593 | C. jeikeium | MEISTLKKEKLHVKDELSQYLANYKK | 801 |
| PF-594 | C. jeikeium | IVSAIV | 802 |
| PF-595 | S. epidermidis | LQNKIYELLYIKERSKLCS | 803 |
| | M. luteus | | |
| | P. mirabilis | | |
| | E. coli | | |
| | P. aeruginosa | | |
| | C. albicans | | |
| | MRSA | | |
| | S. pneumoniae | | |
| | E. faecalis | | |
| | C. jeikeium | | |
| | C. jejuni | | |
| PF-596 | S. epidermidis | SKMWDKILTILILILELIRELIKL | 804 |
| | M. luteus | | |
| | P. mirabilis | | |
| | E. coli | | |
| | P. aeruginosa | | |
| | MRSA | | |
| | E. faecalis | | |
| | C. jeikeium | | |
| | C. jejuni | | |
| PF-597 | P. mirabilis | DEIKVSDEEIEKFIKENNL | 805 |
| PF-598 | S. epidermidis | MKFMLEVRNKAISAYKEITRTQI | 806 |
| | M. luteus | | |
| | P. mirabilis | | |
| | P. aeruginosa | | |
| | C. albicans | | |
| | MRSA | | |
| | S. pneumoniae | | |
| | C. jeikeium | | |
| PF-599 | S. epidermidis | LFEIFKPKH | 807 |
| | P. mirabilis | | |
| | E. coli | | |
| | C. albicans | | |
| | MRSA | | |
| | S. pneumoniae | | |
| | C. jeikeium | | |
| PF-600 | S. epidermidis | TKKIELKRFVDAFVKKSYENYILERELK | 808 |
| | M. luteus | KLIKAINEELPTK | |
| | B. subtilis | | |
| | P. mirabilis | | |
| | E. coli | | |
| | P. aeruginosa | | |
| | MRSA | | |
| | S. pneumoniae | | |
| | E. faecalis | | |
| | C. jeikeium | | |
| PF-601 | C. jeikeium | YRVTVKALE | 809 |
| PF-602 | P. mirabilis | LEKEKKEYIEKLFKTK | 810 |
| | C. jeikeium | | |
| PF-603 | S. epidermidis | IDKLKKMNLQKLSYEVRISQDGKSIYAR | 811 |
| | M. luteus | IK | |
| | B. subtilis | | |
| | E. coli | | |
| | P. aeruginosa | | |
| | MRSA | | |
| | S. pneumoniae | | |
| | E. faecalis | | |
| | C. jeikeium | | |
| PF-604 | S. epidermidis | LMEQVEV | 812 |
| | C. albicans | | |
| | C. jeikeium | | |
| PF-605 | S. epidermidis | HYRWNTQWWKY | 813 |
| | M. luteus | | |
| | P. mirabilis | | |
| | E. coli | | |
| | P. aeruginosa | | |
| | C. albicans | | |
| | MRSA | | |
| | S. pneumoniae | | |
| | E. faecalis | | |
| | C. jeikeium | | |
| | C. jejuni | | |
| PF-607 | S. epidermidis | YIESDPRKFDYIFGAIRDH | 814 |
| | P. mirabilis | | |
| | E. coli | | |
| | MRSA | | |
| | S. pneumoniae | | |
| | C. jeikeium | | |
| PF-609 | P. mirabilis | TEIKLDNNEYLVLNLDDILGILK | 815 |
| | E. coli | | |
| | S. pneumoniae | | |
| PF-610 | S. epidermidis | VFLKLKTSKIDLASIIFYP | 816 |
| | M. luteus | | |
| | P. mirabilis | | |
| | E. coli | | |
| | P. aeruginosa | | |
| | C. albicans | | |
| | MRSA | | |
| | S. pneumoniae | | |
| | E. faecalis | | |
| | C. jeikeium | | |
| | C. jejuni | | |
| PF-612 | S. epidermidis | GTTLKYGLERQLKIDIHPEITIINLNGGA | 817 |
| | M. luteus | DEFAKL | |
| | P. mirabilis | | |
| | E. coli | | |
| | P. aeruginosa | | |
| | C. albicans | | |
| | MRSA | | |
| | S. pneumoniae | | |
| | E. faecalis | | |
| | C. jeikeium | | |
| PF-613 | C. jeikeium | ADEFAKL | 818 |
| PF-614 | S. epidermidis | GLDIYA | 819 |
| | E. coli | | |
| | C. jeikeium | | |
| PF-615 | S. epidermidis | FLNRFIFYIFTVKTKSALIKNLFLD | 820 |
| | M. luteus | | |
| | P. mirabilis | | |
| | E. coli | | |
| | P. aeruginosa | | |
| | C. albicans | | |
| | MRSA | | |
| | S. pneumoniae | | |
| | C. jeikeium | | |
| | C. jejuni | | |
| PF-616 | C. jeikeium | IVFVVTKEKK | 821 |
| PF-617 | P. aeruginosa | PMNAAEPE | 822 |
| | C. albicans | | |
| PF-619 | S. epidermidis | WSRVPGHSDTGWKVWHRW | 823 |
| | M. luteus | | |
| | B. subtilis | | |
| | P. mirabilis | | |
| | E. coli | | |
| | P. aeruginosa | | |
| | C. albicans | | |
| | MRSA | | |
| | S. pneumoniae | | |
| | E. faecalis | | |
| | C. jeikeium | | |
| PF-621 | S. epidermidis | PPSSFLV | 824 |
| | C. albicans | | |
| PF-622 | S. epidermidis | TREDVFSVRLINNIVNKQA | 825 |
| | P. aeruginosa | | |
| | C. albicans | | |
| | S. pneumoniae | | |
| | E. faecalis | | |
| | C. jeikeium | | |
| PF-623 | S. epidermidis | VLFAVYLGALDWLFSWLTQKM | 826 |
| | P. aeruginosa | | |
| | MRSA | | |
| | S. pneumoniae | | |
| | E. faecalis | | |
| | C. jeikeium | | |
| PF-625 | S. epidermidis | SDSTNNARTRKKARDVTTKDIDK | 827 |
| | M. luteus | | |
| | S. pneumoniae | | |
| | C. jeikeium | | |
| PF-626 | S. epidermidis | KYDFDDFEPEEA | 828 |
| | M. luteus | | |
| | E. coli | | |
| | C. albicans | | |
| | MRSA | | |
| | S. pneumoniae | | |
| | E. faecalis | | |
| | C. jeikeium | | |
| PF-627 | S. epidermidis | INDLLSYFTLHEK | 829 |
| | P. aeruginosa | | |
| | MRSA | | |
| | S. pneumoniae | | |
| | E. faecalis | | |
| | C. jeikeium | | |
| PF-629 | S. epidermidis | GLAAIATVFALY | 830 |
| | P. aeruginosa | | |
| | C. albicans | | |
| | MRSA | | |
| | S. pneumoniae | | |
| | E. faecalis | | |
| | C. jeikeium | | |
| PF-630 | S. epidermidis | IPATPIIHS | 831 |
| | M. luteus | | |
| | P. mirabilis | | |
| | P. aeruginosa | | |
| | C. albicans | | |
| | MRSA | | |
| | S. pneumoniae | | |
| | E. faecalis | | |
| | C. jeikeium | | |
| PF-631 | S. epidermidis | LIIYFSKTGNTARATRQI | 832 |
| | P. aeruginosa | | |
| | C. albicans | | |
| | MRSA | | |
| | S. pneumoniae | | |
| | E. faecalis | | |
| | C. jeikeium | | |
| PF-632 | S. epidermidis | TTIQGVASLEKHGFRYTIIYPTRI | 833 |
| | P. aeruginosa | | |
| | C. albicans | | |
| | MRSA | | |
| | S. pneumoniae | | |
| | E. faecalis | | |
| | C. jeikeium | | |
| PF-634 | S. epidermidis | MPKARPVNHNKKKSKITIKSNFTLFYM | 834 |
| | M. luteus | FNP | |
| | P. mirabilis | | |
| | E. coli | | |
| | P. aeruginosa | | |
| | C. albicans | | |
| | MRSA | | |
| | S. pneumoniae | | |
| | E. faecalis | | |
| | C. jeikeium | | |
| PF-635 | S. epidermidis | MNAHGHSLIFQKMIVHAFAFFSKQKNY | 835 |
| | P. aeruginosa | LYF | |
| | C. albicans | | |
| | MRSA | | |
| | S. pneumoniae | | |
| | E. faecalis | | |
| | C. jeikeium | | |
| PF-636 | S. epidermidis | LVRLA | 836 |
| | C. albicans | | |
| | MRSA | | |
| | S. pneumoniae | | |
| | E. faecalis | | |
| PF-637 | S. epidermidis | SRIKQDARSVRKYDRIGIFFYSFKSA | 837 |
| | P. aeruginosa | | |
| | C. albicans | | |
| | MRSA | | |
| | S. pneumoniae | | |
| | E. faecalis | | |
| | C. jeikeium | | |
| PF-638 | S. epidermidis | TFILPK | 838 |
| | C. albicans | | |
| | MRSA | | |
| | C. jeikeium | | |
| PF-639 | S. pneumoniae | QATQIKSWIDRLLVSED | 839 |
| | C. jeikeium | | |
| PF-640 | C. albicans | MGDINRNF | 840 |
| PF-641 | S. epidermidis | SWKCHHLAIGGSWKCHHLAI | 841 |
| | M. luteus | | |
| | E. coli | | |
| | C. albicans | | |
| | MRSA | | |
| | E. faecalis | | |
| | C. jeikeium | | |
| | C. jejuni | | |
| PF-642 | M. luteus | FTTPMIGIPAGLLGGSYYLKRREEKGK | 842 |
| | MRSA | | |
| | C. jeikeium | | |
| PF-643 | Mycobacteria spp | VRCRL | 843 |
| PF-644 | Mycobacteria spp | TSGLIIGENGLNGL | 844 |
| PF-645 | Mycobacteria spp | SNSVQQG | 845 |
| PF-646 | Mycobacteria spp | APASPGRRPG | 846 |
| PF-647 | Mycobacteria spp | GTFLGQKCAAATAS | 847 |
| PF-648 | S. mutans | ARRYPAAGS | 848 |
| | E. coli | | |
| PF-649 | Mycobacteria spp | CPRYPFVDVGPAGPWRARWRVGS | 849 |
| PF-650 | Mycobacteria spp | IRSDQPGRQSRSSPRWPTGAGRHR | 850 |
| PF-651 | Mycobacteria spp | PRWPTGAGRHR | 851 |
| PF-652 | Mycobacteria spp | FLAPARPDLQAQRQALAQ | 852 |
| PF-653 | Mycobacteria spp | QSVHPLPAETPVADVI | 853 |
| PF-654 | Mycobacteria spp | LSGRLAGRR | 854 |
| PF-655 | M. smegmatis | DAPCFDDQFGDLKCQMC | 855 |
| PF-656 | Mycobacteria spp | RGMFVPFHDVDCVQ | 856 |
| PF-657 | Mycobacteria spp | YVANYTITQFGRDFDDRLAVAIHFA | 857 |
| PF-658 | Mycobacteria spp | PTTPPPTTPPEIPTGGTVIST | 858 |
| PF-659 | Mycobacteria spp | TVIST | 859 |
| PF-660 | Mycobacteria spp | TDPQATAAPRRRTSPR | 860 |
| PF-661 | Mycobacteria spp | PDEDIRRRAILPPAGPCRPMSPE | 861 |
| PF-662 | Mycobacteria spp | GKQSRAHGPVASRREFRRKSG | 862 |
| PF-663 | Mycobacteria spp | ATLIPRKA | 863 |
| PF-664 | M. smegmatis | DQLCVEYPARVSTG | 864 |
| PF-665 | Mycobacteria spp | VLRVATAVGEVPTGL | 865 |
| PF-666 | Mycobacteria spp | PNRRSRPR | 866 |
| PF-667 | Mycobacteria spp | PAHQRLRIDQRLVADRDMVQDYES | 867 |
| PF-668 | Mycobacteria spp | TNAESMALAFRGRVHMSVNIAGLT | 868 |
| PF-669 | Mycobacteria spp | RADRIESYPADGDRVITLWRNPYR | 869 |
| PF670 | Mycobacteria spp | TVIVAPMHSGV | 870 |
| PF-671 | S. mutans | TVSAFRTVH | 871 |
| | E. coli | | |
| PF-673 | S. mutans | VRRLRM | 872 |
| | E. coli | | |
| PF-674 | S. mutans | DGCDSEPALTYR | 873 |
| | E. coli | | |
| PF-675 | Mycobacteria spp | EIIPISPTRRCEMHTMSSAEYRGL | 874 |
| PF-676 | S. mutans | AEYRGL | 875 |
| | E. coli | | |
| PF-677 | Mycobacteria spp | TCRGAGMH | 876 |
| PF-678 | Mycobacteria spp | RDRRWTRRDMYDWLESARV | 877 |
| PF-679 | S. mutans | CRARFIRR | 878 |
| | E. coli | | |
| PF-680 | Mycobacteria spp | ADPHPTTGI | 879 |
| PF-681 | M. smegmatis | TALTTVGVSGARLITYCVGVEDI | 880 |
| PF-682 | Mycobacteria spp | RRGKSEQGLSRR | 881 |
| PF-683 | Mycobacteria spp | LWPVA | 882 |
| PF-684 | Mycobacteria spp | RKLSLASGFALWRRSLV | 883 |
| PF-685 | Mycobacteria spp | PTLWLACL | 884 |
| PF-686 | M. smegmatis | LAVLMGYIGYRGWSGKRHINRQ | 885 |
| PF-687 | Mycobacteria spp | AKRVLSLAVAPHRRQPVQGT | 886 |
| PF-688 | Mycobacteria spp | ARNHAVIPAG | 887 |
| PF-689 | S. mutans | SAPSG | 888 |
| | E. coli | | |
| PF-690 | Mycobacteria spp | MIPLAGDPVSSHRTVEFGVLGTYLVSG | 889 |
| | | GSL | |
| PF-691 | Mycobacteria spp | HRTVEFGVLGTYLVSGGSL | 890 |
| PF-692 | Mycobacteria spp | GVAREDPLEPDPLAPIIDDSR | 891 |
| PF-693 | Mycobacteria spp | PDPAR | 892 |
| PF-694 | Mycobacteria spp | DLIRPLYSMSAPSVA | 893 |
| PF-695 | Mycobacteria spp | ALSVMLGNIPLVVPNANQL | 894 |
| PF-696 | Mycobacteria spp | IRSGISAAYARPLR | 895 |
| PF-697 | Mycobacteria spp | RADARAK | 896 |
| PF-698 | Mycobacteria spp | SSGRAGVKCRRPTGR | 897 |
| PF-699 | Mycobacteria spp | GRAGVKCRRPTGR | 898 |
| PF-700 | Mycobacteria spp | LNWPFTGR | 899 |
| PF-701 | S. mutans | PRGAQSGHG | 900 |
| PF-702 | Mycobacteria spp | LSGRLAGRR | 901 |
| PF-703 | Mycobacteria spp | MTTVDNIVGLVIAVALMAFLFAALLFPE | 902 |
| | | KF | |
| PF-704 | Mycobacteria spp | APAARAAL | 903 |
| PF-705 | S. mutans | GEEEGTVAD | 904 |
| | E. coli | | |
| PF-706 | L. pneumophila | LGYGAWIGCGLGLNGFHRID | 905 |
| PF-707 | S. mutans | IDPESIVTTNNKQDNVDEQ | 906 |
| | E. coli | | |
| PF-709 | S. mutans | NKKHSPMD | 907 |
| PF-711 | S. mutans | KTAGPTGTIYKTN | 908 |
| PF-712 | S. mutans | QIYRHVHKVQAKSANLRLY | 909 |
| | E. coli | | |
| PF-714 | L. pneumophila | FVVTQRMLRMYKK | 910 |
| PF-716 | S. mutans | HGENHHHKSDEKDNDSSEKKD | 911 |
| PF-717 | E. coli | PQSEVTFENIYAPKANGGGLYGI | 912 |
| PF-720 | S. mutans | SLDMGK | 913 |
| PF-724 | L. pneumophila | CYRFLTPKRPTRIS | 914 |
| PF-727 | S. mutans | AYARCRHDYPFTLGQMQTH | 915 |
| | E. coli | | |
| PF-728 | S. mutans | AIGQEQDRREYYYYSGYPYYY | 916 |
| | E. coli | | |
| PF-731 | L. pneumophila | RHKLIRLPLSESVFCFLNNPKI | 917 |
| PF-732 | E. coli | DRPSQTTHHTLSSSRITGPS | 918 |
| PF-733 | S. mutans | VISRQMGSEAVLELFIIM | 919 |
| | E. coli | | |
| PF-735 | S. mutans | YDPLFPNDKN | 920 |
| | E. coli | | |
| PF-737 | S. epidermidis | KSSGSSASASSTAGGSSSK | 921 |
| | S. pneumoniae | | |
| PF-738 | S. epidermidis | KSGATSAASGAKSGASS | 922 |
| | C. albicans | | |
| | C. jeikeium | | |
| PF-741 | S. epidermidis | AKREDTVAAQIGANILNLIQ | 923 |
| | M. luteus | | |
| | P. mirabilis | | |
| | P. aeruginosa | | |
| | C. albicans | | |
| | MRSA | | |
| | S. pneumoniae | | |
| | E. faecalis | | |
| PF-744 | S. epidermidis | LGVGTFVGKVLIKNQQKQKSKKKAQ | 924 |
| | M. luteus | | |
| | E. coli | | |
| | MRSA | | |
| | S. pneumoniae | | |
| | E. faecalis | | |
| | C. jeikeium | | |
| PF-745 | S. epidermidis | ANSQNSLFSNRSSFKSIFDKKSNITTNAT | 925 |
| | M. luteus | TPNSNIIIN | |
| | C. albicans | | |
| PF-746 | S. epidermidis | FLGNSQYFTRK | 926 |
| | M. luteus | | |
| | E. coli | | |
| | C. albicans | | |
| | S. pneumoniae | | |
| | E. faecalis | | |
| | C. jeikeium | | |
| PF-748 | S. epidermidis | FQGFFDVAVNKWWEEHNKAKLWKNV | 927 |
| | M. luteus | KGKFLEGEGEEEDDE | |
| | E. coli | | |
| | P. aeruginosa | | |
| | C. albicans | | |
| | MRSA | | |
| | S. pneumoniae | | |
| | E. faecalis | | |
| | C. jeikeium | | |
| PF-749 | S. epidermidis | GVNKWWEEHNKAKLWKNVKGKFLEG | 928 |
| | M. luteus | EGEEEDDE | |
| | E. coli | | |
| | P. aeruginosa | | |
| | C. albicans | | |
| | S. pneumoniae | | |
| | C. jeikeium | | |
| PF-750 | M. luteus | AESSPAKTTA | 929 |
| | C. jeikeium | | |
| PF-751 | S. epidermidis | AESSPAQETT | 930 |
| | E. coli | | |
| | C. albicans | | |
| | C. jeikeium | | |
| PF-752 | S. epidermidis | LHVIRPRPELSELKFPITKILKVNKQGLKK | 931 |
| | E. coli | | |
| | MRSA | | |
| | S. pneumoniae | | |
| | E. faecalis | | |
| PF-756 | S. epidermidis | DALLRLA | 932 |
| | M. luteus | | |
| | C. albicans | | |
| | MRSA | | |
| | C. jeikeium | | |
| PF-757 | M. luteus | PQAISSVQQNA | 933 |
| | C. albicans | | |
| | MRSA | | |
| PF-758 | S. epidermidis | PEIIKIVSGLL | 934 |
| | M. luteus | | |
| | E. coli | | |
| | MRSA | | |
| | S. pneumoniae | | |
| | E. faecalis | | |
| | C. jeikeium | | |
| PF-760 | S. epidermidis | DHITLDDYEIHDGFNFELYYG | 935 |
| | M. luteus | | |
| PF-761 | S. epidermidis | SKFELVNYASGCSCGADCKCASETECK | 936 |
| | M. luteus | CASKK | |
| | P. mirabilis | | |
| | P. aeruginosa | | |
| | C. albicans | | |
| | MRSA | | |
| | S. pneumoniae | | |
| | E. faecalis | | |
| PF-762 | M. luteus | PAPAPSAPAPAPEQPEQPA | 937 |
| | C. albicans | | |
| PF-763 | S. epidermidis | GIWMARNYFHRSSIRKVYVESDKEYER | 938 |
| | M. luteus | VHPMQKIQYEGNYKSQ | |
| | E. coli | | |
| | C. albicans | | |
| | MRSA | | |
| | S. pneumoniae | | |
| | E. faecalis | | |
| PF-764 | S. epidermidis | GYFEPGKRD | 939 |
| | M. luteus | | |
| | C. albicans | | |
| | MRSA | | |
| | S. pneumoniae | | |
| | E. faecalis | | |
| | C. jeikeium | | |
| PF-765 | S. epidermidis | YLYWEVEHKPIIAKRDAYYAQLRKQKE | 940 |
| | M. luteus | IEEGA | |
| | E. coli | | |
| | MRSA | | |
| | E. faecalis | | |
| | C. jeikeium | | |
| PF-766 | S. epidermidis | DAYYAQLRKQKEIEEGA | 941 |
| | M. luteus | | |
| | C. albicans | | |
| | MRSA | | |
| | E. faecalis | | |
| | C. jeikeium | | |
| PF-767 | S. epidermidis | DGKQGEPVALKPTDN | 942 |
| | M. luteus | | |
| | E. coli | | |
| | MRSA | | |
| | S. pneumoniae | | |
| | E. faecalis | | |
| | C. jeikeium | | |
| PF-768 | S. epidermidis | GFRGGKRGGARG | 943 |
| | S. pneumoniae | | |
| | E. faecalis | | |
| | C. jeikeium | | |
| PF-770 | S. epidermidis | GVGIGFIMMGVVGYAVKLVHIPIRYLIV | 944 |
| | M. luteus | | |
| | P. mirabilis | | |
| | E. coli | | |
| | P. aeruginosa | | |
| | C. albicans | | |
| | MRSA | | |
| | S. pneumoniae | | |
| | E. faecalis | | |
| | C. jeikeium | | |
| PF-772 | S. epidermidis | TKESSS | 945 |
| | C. albicans | | |
| | MRSA | | |
| | S. pneumoniae | | |
| | C. jeikeium | | |
| PF-773 | S. epidermidis | TLKESK | 946 |
| | C. albicans | | |
| | C. jeikeium | | |
| PF-776 | S. epidermidis | VSILLYLSATIILPNVLRLLVARAIIVRV | 947 |
| | M. luteus | | |
| | P. mirabilis | | |
| | C. albicans | | |
| | MRSA | | |
| | S. pneumoniae | | |
| | E. faecalis | | |
| PF-777 | Mycobacteria spp. | PGADGKLAEASAAIARLVRS | 948 |
| PF-778 | Mycobacteria spp. | MNLILTAHGT | 949 |
| PF-779 | Mycobacteria spp. | IYGDFFNFYLCDISLKVNGLQPGGPVRT | 950 |
| | | VKLFGQPTGRCTPQ | |
| PF-780 | Mycobacteria spp. | AVYDALVALAAAEHRAELATRDARAK | 951 |
| | | DTYEKIGVHVVVAA | |
| PF-781 | Mycobacteria spp. | PLVVVNHRRAERSRG | 952 |
| PF-782 | Mycobacteria spp. | TGPRRGIDLTSNRALSEVLDEGLELNSRK | 953 |
| PF-783 | Mycobacteria spp. | FTSEVRGVFTYRVNKAGLITNMRGYW | 954 |
| | | NLDMMTFGNQE | |
| PF-784 | Mycobacteria spp. | MAMTTVDNIVGLVIAVALMAFLFAALL | 955 |
| | | FPEKF | |
| PF-785 | Mycobacteria spp. | MRPQHSPAGKAFVVKKITHEQS | 956 |
| PF-786 | Mycobacteria spp. | LSERERRRLKRGII | 957 |
| PF-787 | Mycobacteria spp. | MTERQRRALLKQHPEVVSWSDYLEKR | 958 |
| | | KRRTGTAG | |
| PF-788 | Mycobacteria spp. | GLITVFAGTARILQLRRAAKKTHAAALR | 959 |
| PF-789 | Mycobacteria spp. | PRGAQSGHG | 960 |
| PF-790 | Mycobacteria spp. | PAGPDHLDQRDHR | 961 |
| PF-791 | S. mutans | IFLTTQNTDYSEHNAA | 962 |
| PF-792 | S. mutans | ALHASGIQAI | 963 |
| PF-793 | S. mutans | YTQUNNASAYAMLLTNKDTVP | 964 |
| PF-794 | S. mutans | NLYFENQGN | 965 |
| PF-795 | S. mutans | ALHKSGIQVIADWVPDQIYN | 966 |
| PF-796 | S. mutans | YTQSNIPTAYALMLSNKDSI | 967 |
| PF-797 | S. mutans | WYYFDNNGYM | 968 |
| PF-798 | S. mutans | ALHSKGIKVMADWVPDQMYA | 969 |
| PF-799 | S. mutans | YTHYNTALSYALLLTNKSSVP | 970 |
| PF-800 | S. mutans | WYYFDNNGYM | 971 |
| PF-C003 | A. naeslundii | FCSVDHDVITIAADHVKQGAEA | 972 |
| | P. gingivalis | | |
| | S. mutans | | |
| PF-C008 | A. naeslundii | AQPRRTWLVNFGEVPSPGLTNDGMPDH | 973 |
| PF-C034 | S. mutans | HPMPITVRSRKPGPLTAPSEH | 974 |
| | E. coli | | |
| PF-C045 | A. naeslundii | FREGMGWPLSNEGSPTAPLPKHRNQV | 975 |
| | T. denticola | | |
| PF-C050 | A. naeslundii | QGLARPVLRRIPL | 976 |
| | S. mutans | | |
| PF-C052 | A. naeslundii | SRFRNGV | 977 |
| | F. nucleatum | | |
| | S. mutans | | |
| PF-C055 | A. naeslundii | YNLSIYIYFLHTITIAGLITLPFII | 978 |
| | F. nucleatum | | |
| | P. gingivalis | | |
| | S. mutans | | |
| PF-C057 | A. naeslundii | YFWWYWVQDCIPYKNNEVWLELSNN | 979 |
| | F. nucleatum | MK | |
| | P. gingivalis | | |
| | S. mutans | | |
| PF-C058 | A. naeslundii | FETGFGDGYYMSLWGLNEKDEVCKVV | 980 |
| | F. nucleatum | IPFINPELID | |
| | P. gingivalis | | |
| | S. mutans | | |
| PF-C061 | A. naeslundii | TLNYKKMFFSVIFLLGLNYLICNSPLFFK | 981 |
| | F. nucleatum | QIEF | |
| | P. gingivalis | | |
| | S. mutans | | |
| | T. denticola | | |
| PF-C062 | A. naeslundii | PLARATEVVATLFIICSLLLYLTR | 982 |
| | F. nucleatum | | |
| | P. gingivalis | | |
| | S. mutans | | |
| | T. denticola | | |
| PF-C063 | A. naeslundii | SHFRKGD | 983 |
| | F. nucleatum | | |
| | S. mutans | | |
| PF-C064 | A. naeslundii | DEEALEMGANLYAQFAIDFLNSKK | 984 |
| | F. nucleatum | | |
| | P. gingivalis | | |
| | S. mutans | | |
| | T. denticola | | |
| PF-C065 | A. naeslundii | DEERYSDSYFLKEKVFYLILALFLILFHQ | 985 |
| | F. nucleatum | KYLYFLEIITI | |
| | P. gingivalis | | |
| | S. mutans | | |
| PF-C068 | A. naeslundii | LNLFASI | 986 |
| | F. nucleatum | | |
| | S. mutans | | |
| PF-C069 | A. naeslundii | NALMLREMQLAKNIKVEVTDVLSNKK | 987 |
| | F. nucleatum | YC | |
| | P. gingivalis | | |
| | S. mutans | | |
| | T. denticola | | |
| PF-C071 | A. naeslundii | QVIVKIL | 988 |
| | F. nucleatum | | |
| | S. mutans | | |
| PF-C072 | A. naeslundii | KKMFSLIRKVNWIFFILFIVLDLTNVFPLI | 989 |
| | F. nucleatum | RTILFAILSRQ | |
| | P. gingivalis | | |
| | S. mutans | | |
| | T. denticola | | |
| PF-C075 | A. naeslundii | KALVISVFAIVFSIIFVKFFYWRDKK | 990 |
| | F. nucleatum | | |
| | P. gingivalis | | |
| | S. mutans | | |
| | T. denticola | | |
| PF-C080 | A. naeslundii | INIPGLF | 991 |
| | F. nucleatum | | |
| | S. mutans | | |
| PF-C084 | A. naeslundii | FFSVIFLFGLNYLICNSPLFNILR | 992 |
| | F. nucleatum | | |
| | P. gingivalis | | |
| | S. mutans | | |
| PF-C085 | A. naeslundii | KKFKIFVIINWFYHKYIILNFEENF | 993 |
| | F. nucleatum | | |
| | P. gingivalis | | |
| | S. mutans | | |
| | T. denticola | | |
| PF-C086 | A. naeslundii | ELFFTILSDCNELFLLHLLQQPLFYIKKGK | 994 |
| | F. nucleatum | | |
| | P. gingivalis | | |
| | S. mutans | | |
| | T. denticola | | |
| PF-C088 | A. naeslundii | DIANNILNSVSERLIIA | 995 |
| | F. nucleatum | | |
| | P. gingivalis | | |
| | S. mutans | | |
| | T. denticola | | |
| PF-C091 | A. naeslundii | ASNTPRFVRLTLFNFYSKIWNVTHLFLF | 996 |
| | F. nucleatum | NNL | |
| | P. gingivalis | | |
| | S. mutans | | |
| | T. denticola | | |
| PF-C093 | A. naeslundii | EKLGTMV | 997 |
| | F. nucleatum | | |
| | S. mutans | | |
| PF-C095 | A. naeslundii | LLALNMNEDTYYFELFFIFDNQNKKWL | 998 |
| | F. nucleatum | IFDLKERG | |
| | P. gingivalis | | |
| | S. mutans | | |
| PF-C098 | A. naeslundii | PETKGKVSAFVFGIVVANVIAVVYILYM | 999 |
| | F. nucleatum | LREIGIIQ | |
| | P. gingivalis | | |
| | S. mutans | | |
| | T. denticola | | |
| PF-C120 | A. naeslundii | ASLSTMTFKVMELKELIILLCGLTMLMI | 1000 |
| | F. nucleatum | QTEFV | |
| | P. gingivalis | | |
| | S. mutans | | |
| | T. denticola | | |
| PF-C131 | A. naeslundii | QWIVAKREIRMHIYCHISVIHVIIFFG | 1001 |
| | F. nucleatum | | |
| | P. gingivalis | | |
| | S. mutans | | |
| PF-C134 | A. naeslundii | NELMKYPATLTATATTPGIKYSHLCSVCL | 1002 |
| | F. nucleatum | | |
| | P. gingivalis | | |
| | S. mutans | | |
| | T. denticola | | |
| PF-C135 | A. naeslundii | KNTHAYLRVLRLSSLILSYQASVYPLFA | 1003 |
| | F. nucleatum | YLCQQKDY | |
| | P. gingivalis | | |
| | S. mutans | | |
| PF-C136 | A. naeslundii | LILSYQASVYPLFAYLCQQKDY | 1004 |
| | F. nucleatum | | |
| | P. gingivalis | | |
| | S. mutans | | |
| | T. denticola | | |
| PF-C137 | A. naeslundii | QRMYWFKRGFETGDFSAGDTFAELK | 1005 |
| | F. nucleatum | | |
| | P. gingivalis | | |
| | S. mutans | | |
| PF-C139 | A. naeslundii | LLASHPERLSLGVFFVYRVLHLLLENT | 1006 |
| | F. nucleatum | | |
| | P. gingivalis | | |
| | S. mutans | | |
| | T. denticola | | |
| PF-C142 | A. naeslundii | DFPPLSFFRRRFHAYTAPIDNFFGANPF | 1007 |
| | F. nucleatum | | |
| | P. gingivalis | | |
| | S. mutans | | |
| | T. denticola | | |
| PF-C143 | A. naeslundii | VVFGGGDRLV | 1008 |
| | F. nucleatum | | |
| | P. gingivalis | | |
| | S. mutans | | |
| | T. denticola | | |
| PF-C145 | A. naeslundii | YGKESDP | 1009 |
| | F. nucleatum | | |
| | P. gingivalis | | |
| | S. mutans | | |
| | T. denticola | | |
| PF-C160 | F. nucleatum | AASGFTYCASNGVWHPY | 1010 |
| PF-C180 | F. nucleatum | TVEELDKAFTWGAAAALAIGVIAINVG | 1011 |
| | P. gingivalis | LAAGYCYNNNDVF | |
| | S. mutans | | |
| | T. denticola | | |
| PF-C181 | P. gingivalis | KMRAGQVVFIYKLILVLLFYVLQKLFD | 1012 |
| | | LKKGCF | |
| PF-C194 | A. naeslundii | NTNDLLQAFELMGLGMAGVFIVLGILYI | 1013 |
| | F. nucleatum | VAELLIKIFPVNN | |
| | P. gingivalis | | |
| | S. mutans | | |
| | T. denticola | | |
| PF-C259 | F. nucleatum | AEIQPHCLSVL | 1014 |
| | S. mutans | | |
| PF-C271 | A. naeslundii | FFPSYYSIIITYF | 1015 |
| | F. nucleatum | | |
| | P. gingivalis | | |
| | S. mutans | | |
| | T. denticola | | |
| PF-C273 | A. naeslundii | KNMLKRRMKQKRLFDEEDRLRVLSKY | 1016 |
| | P. gingivalis | TKSYY | |
| | S. mutans | | |
| | T. denticola | | |
| PF-C281 | A. naeslundii | KKEKLLTAIRLQHRAEIRGYFTIFFLFFRI | 1017 |
| | F. nucleatum | | |
| | P. gingivalis | | |
| | S. mutans | | |
| | T. denticola | | |
| PF-C285 | A. naeslundii | FTIIELKKQKIKHGENNKKTAHPLNEPF | 1018 |
| | F. nucleatum | CARA | |
| | P. gingivalis | | |
| | S. mutans | | |
| | T. denticola | | |
| PF-C290 | A. naeslundii | GNVHPESDFHNLIQFIKTFLYFTIFFKYFL | 1019 |
| | F. nucleatum | | |
| | P. gingivalis | | |
| | S. mutans | | |
| | T. denticola | | |
| PF-C291 | A. naeslundii | HPFLTGTGCPLFLIFRLFFVKAYFSFTVF | 1020 |
| | F. nucleatum | | |
| | P. gingivalis | | |
| | S. mutans | | |
| PF-S003 | S. epidermidis | ALALLKQDLLNFEGRGRIITSTYLQFNE | 1021 |
| | M. luteus | GCVP | |
| | P. mirabilis | | |
| | E. coli | | |
| | P. aeruginosa | | |
| | C. albicans | | |
| | MRSA | | |
| | S. pneumoniae | | |
| | E. faecalis | | |
| | C. jeikeium | | |
| | C. jejuni | | |
| | M. smegmatis | | |
| PF-S004 | S. epidermidis | VLLNIFRTLLEFFSPSNAPGAEDVPLPDT | 1022 |
| | MRSA | QA | |
| | C. jeikeium | | |
| PF-S007 | S. epidermidis | VVAGVVLLTALAVGSKRKEKKQIKEIQ | 1023 |
| | MRSA | RLLAATR | |
| PF-S015 | S. epidermidis | IENLERGARRPP | 1024 |
| | MRSA | | |
| | C. jeikeium | | |
| PF-S018 | S. epidermidis | GMPQIPRLRI | 1025 |
| | M. luteus | | |
| | C. albicans | | |
| | MRSA | | |
| | E. faecalis | | |
| | C. jeikeium | | |
| | C. jejuni | | |
| PF-S023 | S. epidermidis | MAEDERRALKRRTNRGRTRTRKRITV | 1026 |
| | MRSA | | |
| PF-S026 | S. epidermidis | TELKYNGEEYLLLTQRDILAVIEK | 1027 |
| | MRSA | | |
| | C. jeikeium | | |
| PF-S029 | M. luteus | TSDTQSQSPWLFDNADIVNIYPVQLMHS | 1028 |
| | P. mirabilis | SDND | |
| | E. coli | | |
| | C. albicans | | |
| | C. jeikeium | | |
| | C. jejuni | | |

* Peptide binding was conducted in aqueous buffers that varied depending on peptide solubility. For example: Brain Heart Infusion (BHI) Media; 1X Phosphate-buffered saline (PBS); 0.05% v/v Tween-20; 0.05% v/v Tween-80; 1% v/v Glycerol; 50 μM Guanidine hydrochloride; 0.05% v/v Acetic acid; 50 μM Urea; 1% v/v Polyethylene glycol 400 (PEG 400); 20 mM Sodium glutamate; 50 mM Piperazine-1,4-bis(2-ethanesulfonic acid) (PIPES); 50 mM Sodium acetate; 1% v/v Pluronic 17R4; 1% w/v Pluronic F108; 1% w/v Pluronic P123; 0.2% v/v Cetyl trimethylammonium bromide (CTAB); 0.8% v/v β-D-Octyl glucoside (BOG); 0.2% CTAB and 0.05% Tween-20; 0.2% CTAB and 0.05% Tween-80; 0.2% CTAB and 1% glycerol; and 20 mM HEPES (4-(2-hydroxyethyl)-1- piperazineethanesulfonic acid), 150 mM sodium chloride, 1 mM magnesium chloride and 0.1% CTAB. Preferably, binding was evaluated in 1x PBS.
** Three-amino acid code: Dab: Diaminobutyric acid; Orn: Ornithine; cDOrn, cOrn: side-chain cyclical Ornithine; Abreviations: c(X . . . Y) indicates amino acids are cyclic, connected X to Y; DX indicates D-isoform amino acids.

[0091] In certain embodiments, the amino acid sequence of the targeting peptides comprises or consists of a single amino acid sequence, e.g., as listed above in Table 3. In certain embodiments the amino acid sequence of the targeting peptides comprises two copies, three copies, four copies, five copies six copies or more of one or more of the amino acid sequences listed in Table 3, and/or Table 10, and/or Table 12. Thus, compound targeting constructs are contemplated where the construct comprises multiple domains each having targeting activity. The targeting domains comprising such a construct can be the same or different. In certain embodiments the construct comprises at least 2, at least 3, at least 4, at least 5, at least 6, at least 7, or at least 8 different targeting domains each domain comprising a different targeting sequence.

[0092] Various targeting domains comprising such a construct can be joined directly to each other or two or more of such domains can be attached to each other via a linker. An illustrative, but non-limiting, list of suitable linkers is provided in Table 16. Thus, in certain embodiments, two or more targeting domains comprising a compound/multiple targeting construct are chemically conjugated together.

[0093] In certain embodiments the two or more targeting domains comprising the construct are joined by a peptide linker. Where all the targeting domains are attached directly to each other or are joined by peptide linkers, the entire construct can be provided as a single-chain peptide (fusion protein).

[0094] In various embodiments, the targeting peptides described herein comprise one or more of the amino acid sequences shown in Table 3, and/or Table 10, and/or Table 12 (and/or the retro, inverso, retroinverso, etc. forms of such sequences). In certain embodiments the peptides range in length up to about 100 amino acids in length, preferably up to about 80, about 70, about 60, or about 51 amino acids in length. In certain embodiments the peptides range in length from about 8 amino acids up to about 100 amino acids 80 amino acids, 60 amino acids or about 51 amino acids in length. In certain embodiments the peptides range in length from about 8 up to about 50, 40, 30, 20, 15, 15, 13, or 12 amino acids in length.

[0095] As shown in Tables 3, 10, and 12 the various amino acid sequences described herein target particular microorganisms. The range of activity of the peptides or compositions comprising such peptides can be increased by including amino acid sequences that target different microorganisms either as separate components and/or as multiple domains within a single construct.

[0096] In some embodiments greater specificity and/or avidity can be obtained by including multiple different amino acid sequences that target the same microorganism.

### II. Antimicrobial Peptides.

[0097] A) Uses of Antimicrobial Peptides.

[0098] The antimicrobial peptides described herein also have a wide variety of uses. For example, the peptides can be formulated individually, in combination, in combination with other antimicrobial peptides, and/or in combination with various antibacterial agents to provide antimicrobial pharmaceuticals.

[0099] In various embodiments, the antimicrobial peptides described herein can be formulated individually, in combination, in combination with other antimicrobial peptides, and/or in combination with various antibiotic (e.g., antibacterial) agents in “home healthcare” formulations. Such formulations include, but are not limited to toothpaste, mouthwash, tooth whitening strips or solutions, contact lens storage, wetting, or cleaning solutions, dental floss, toothpicks, toothbrush bristles, oral sprays, oral lozenges, nasal sprays, aerosolizers for oral and/or nasal application, wound dressings (e.g., bandages), and the like.

[0100] In various embodiments the antimicrobial peptides described herein can be formulated individually, in combination, in combination with other antimicrobial peptides, and/or in combination with various antibiotic (e.g., antibacterial) agents in various cleaning and/or sterilization formulations for use in agriculture, in fool preparation and transport, in the home, workplace, clinic, or hospital.

[0101] In certain embodiments the antimicrobial peptides described herein are attached to one or more targeting moieties to specifically and/or to preferentially deliver the peptide(s) to a target (e.g. a target microorganism, biofilm, bacterial film, particular tissue, etc.).

[0102] Other possible uses of the targeting and/or antimicrobial peptides disclosed herein include, but are not limited to biofilm dispersal, biofilm retention, biofilm formation, anti-biofilm formation, cell agglutination, induction of motility or change in motility type, chemoattractant or chemorepellent, extracellular signal for sporogenesis or other morphological change, induction or inhibition of virulence gene expression, utilized as extracellular scaffold, adhesin or binding site, induction or suppression of host immune response, induction or suppression of bacterial/fungal antimicrobial molecule production, quorum-sensing, induction of swarming behavior, apoptosis or necrosis inducing in eukaryotic cells, affecting control of or inducing the initiation of cell cycle in eukaryotes, in archaea or prokaryotes, induces autolysis or programmed cell death, inhibition of phage/virus attachment or replication, evasion of innate immunity, induction or inhibition of genetic transformation or transduction competence, induction or inhibition of pilus-mediated conjugation, induction or inhibition of mating behavior in bacteria and fungi, induction or inhibition of nodule formation or metabolic compartmentalization, metal, ion, or nutrient binding, acquisition or inhibition of metal, ion, or nutrient binding and acquisition, and the like.

[0103] In certain embodiments, compositions and methods are provided for decreasing the infectivity, morbidity, and rate of mortality associated with a variety of pathogens. The present invention also relates to methods and compositions for decontaminating areas, samples, solutions, and foodstuffs colonized or otherwise infected by pathogens and microorganisms. Certain embodiments of the present compositions are nontoxic and may be safely ingested by humans and other animals. Additionally, certain embodiments of the present invention are chemically stable and non-staining.

[0104] In some embodiments, the present invention provides compositions and methods suitable for treating animals, including humans, exposed to pathogens or the threat of pathogens. In some embodiments, the animal is contacted with effective amounts of the compositions prior to exposure to pathogenic organisms. In other embodiments, the animal or human is contacted with effective amounts of the compositions after exposure to pathogenic organisms. Thus, the present invention contemplates both the prevention and treatment of microbiological and other infections.

[0105] In certain embodiments compositions and methods are provided for decontaminating solutions and surfaces, including organic and inorganic samples that are exposed to pathogens or suspected of containing pathogens. In still other embodiments of the present invention, the compositions are used as additives to prevent the growth of harmful or undesired microorganisms in biological and environmental samples.

[0106] These applications of the peptides described herein are intended to be illustrative and not limiting. Using the teaching provided herein, other uses will be recognized by one of skill in the art.

[0107] B Illustrative Novel Antimicrobial Peptides.

[0108] Antimicrobial peptides (also called host defense peptides) are an evolutionarily conserved component of the innate immune response and are found among all classes of life. Unmodified, these peptides are potent, broad spectrum antibiotics which demonstrate potential as novel therapeutic agents. Antimicrobial peptides have been demonstrated to kill Gram-negative and Gram-positive bacteria (including strains that are resistant to conventional antibiotics), mycobacteria (including Mycobacterium tuberculosis), enveloped viruses, and fungi.

[0109] Naturally-occurring antimicrobial peptides are typically short peptides, generally between 12 and 50 amino acids. These peptides often include two or more positively charged residues provided by arginine, lysine or, in acidic environments, histidine, and frequently a large proportion (generally >50%) of hydrophobic residues (see, e.g., Papagianni et al. (2003) Biotechnol Adv 21: 465; Sitaram and Nagaraj (2002) Curr Pharm Des 8: 727; Dürr et al. (2006) Biochim. Biophys. Acta 1758: 1408-1425).

[0110] Frequently the secondary structures of these molecules follow 4 themes, including i) α-helical, ii) β-stranded due to the presence of 2 or more disulfide bonds, iii) β-hairpin or loop due to the presence of a single disulfide bond and/or cyclization of the peptide chain, and iv) extended. Many of these peptides are unstructured in free solution, and fold into their final configuration upon partitioning into biological membranes. The ability to associate with membranes is a definitive feature of antimicrobial peptides although membrane permeabilisation is not necessary. These peptides have a variety of antimicrobial activities ranging from membrane permeabilization to action on a range of cytoplasmic targets.

[0111] The modes of action by which antimicrobial peptides kill bacteria is varied and includes, but is not limited to disrupting membranes, interfering with metabolism, and targeting cytoplasmic components. In many cases the exact mechanism of killing is not known.

[0112] In certain embodiments the antimicrobial peptides include peptides comprising or consisting of one or more of the amino acid sequences shown in Tables 4 (SEQ ID NOs:1029-1078), and/or Table 5 (SEQ ID NOs:1079-1566). In various embodiments the peptides include peptides comprising or consisting of the retro, inverso, retro-inverso, and/or beta form of one or more of the amino acid sequences shown in Tables 4 (SEQ ID NOs:1029-1078), and/or Table 5 (SEQ ID NOs:1079-1566). The peptides can comprise all “L” amino acids, all “D” amino acids, or combinations of “L” and “D” amino acids. Also contemplated are circular permutations of these sequences as well as peptides comprising or consisting of the retro, inverso, retro-inverso, and/or beta form of such circular permutations.

[0113] It will also be recognized, that in certain embodiments, any peptide or compound AMP described herein can be circularized.

[0114] In various embodiments the peptides can optionally bear one or more protecting groups, e.g., and the amino and/or carboxyl termini, and/or on side chains.

[0115] Also contemplated are peptides comprising one, two, three four, or five conservative substitutions of these amino acid sequences.

TABLE 4

Novel antimicrobial peptides, target
microorganisms and MIC values.

| | Organism MIC | | SEQ |
|---|---|---|---|
| ID | (μM) | Structure/sequence | ID NO |
| K-1 | S. mutans, 25 | GLGRVIGRLIKQIIWRR | 1029 |
| K-2 | S. mutans, 12.5 | VYRKRKSILKIYAKLKGWH | 1030 |
| K-7 | S. mutans, 12.5 | NYRLVNAIFSKIFKKKFIKF | 1031 |
| K-8 | S. mutans, 4 | KILKFLFKKVF | 1032 |
| K-9 | S. mutans, 4 | FIRKFLKKWLL | 1033 |
| K-10 | S. mutans, 4 | KLFKFLRKHLL | 1034 |
| K-11 | S. mutans, 4 | KILKFLFKQVF | 1035 |
| K-12 | S. mutans, 8 | KILKKLFKFVF | 1036 |
| K-13 | S. mutans, 16 | GILKKLFTKVF | 1037 |
| K-14 | S. mutans, 8 | LRKFLHKLF | 1038 |
| K-15 | S. mutans, 4 | LRKNLRWLF | 1039 |
| K-16 | S. mutans, 8 | FIRKFLQKLHL | 1040 |
| | P. aeruginosa, 12.5 | | |
| | MRSA , 25 | | |
| K-17 | S. mutans, 8 | FTRKFLKFLHL | 1041 |
| K-18 | S. mutans, 16 | KKFKKFKVLKIL | 1042 |
| K-19 | S. mutans, 16 | LLKLLKLKKLKF | 1043 |
| K-20 | S. mutans, 8 | FLKFLKKFFKKLKY | 1044 |
| K-21 | S. mutans, 8 | GWLKMFKKIIGKFGKF | 1045 |
| K-22 | S. mutans, 8 | GIFKKFVKILYKVQKL | 1046 |
| 1T-88 | | GRLVLEITADEVKALGEALANAKI | 1047 |
| PF-531 | A. baumannii, 25 | YIQFHLNQQPRPKVKKIKIFL-NH2 | 1048 |
| | P. aeruginosa, 50 | | |
| | T. rubrum, 50 | | |
| | A. niger, 25 | | |
| | B. subtilis, 25 | | |
| | C. difficile, 12.5 | | |
| | C. jeikeium, 6.25 | | |
| | S. epidermidis, 50 | | |
| | S. mutans, 12.5 | | |
| PF-527 | P. aeruginosa, 50 | GSVIKKRRKRMAKKKHRKLLKKTRIQR | 1049 |
| | T. rubrum, 25 | RRAGK | |
| | A. niger, 50 | | |
| | B. subtilis, 12.5 | | |
| | C. jeikeium, 6.25 | | |
| | MRSA , 50 | | |
| | S. epidermidis, 25 | | |
| PF-672 | C. albicans, 1.56 | MRFGSLALVAYDSAIKHSWPRPSSVRR | 1050 |
| | T. rubrum, 0.78 | LRM | |
| | A. niger, 3 | | |
| | B. subtilis, 0.78 | | |
| | E. faecalis, 3.13 | | |
| | MRSA , 1.56 | | |
| | S. epidermidis, 0.39 | | |
| PF-606 | E. coli, 50 | FESKILNASKELDKEKKVNTALSFNSHQ | 1051 |
| | MRSA , 50 | DFAKAYQNGKI | |
| | S. epidermidis, 50 | | |
| | S. mutans, 50 | | |
| | S. pneumoniae, 50 | | |
| PF-547 | T. rubrum, 25 | WSRVPGHSDTGWKVWHRW-NH2 | 1052 |
| | B. subtilis, 25 | | |
| | S. mutans, 12.5 | | |
| PF-006 | A. baumannii, 50 | MGIIAGIIKFIKGLIEKFTGK | 1053 |
| | B. subtilis, 25 | | |
| | MRSA , 50 | | |
| PF-545 | A. niger, 50 | RESKLIAMADMIRRRI-NH2 | 1054 |
| | B. subtilis, 25 | | |
| | MRSA , 50 | | |
| PF-278 | C. albicans, 50 | LSLATFAKIFMTRSNWSLKRFNRL | 1055 |
| | T. rubrum, 50 | | |
| | S. epidermidis, 50 | | |
| PF-283 | T. rubrum, 50 | MIRIRSPTKKKLNRNSISDWKSNTSGRF | 1056 |
| | B. subtilis, 50 | FY | |
| | S. epidermidis, 50 | | |
| PF-307 | C. albicans, 50 | MKRRRCNWCGKLFYLEEKSKEAYCCK | 1057 |
| | T. rubrum, 50 | ECRKKAKKVKK | |
| | B. subtilis, 50 | | |
| PF-168 | T. rubrum, 50 | VLPFPAIPLSRRRACVAAPRPRSRQRAS | 1058 |
| | A. niger, 50 | | |
| | MRSA , 50 | | |
| PF-538 | A. baumannii, 25 | KNKKQTDILEKVKEILDKKKKTKSVGQ | 1059 |
| | C. difficile, 25 | KLY | |
| PF-448 | A. niger, 25 | SLQSQLGPCLHDQRH | 1060 |
| | S. pneumoniae, 50 | | |
| PF-583 | MRSA , 50 | KFQGEFTNIGQSYIVSASHMSTSLNTGK | 1061 |
| | S. epidermidis, 50 | | |
| PF-600 | E. coli, 50 | TKKIELKRFVDAFVKKSYENYILERELK | 1062 |
| | S. pneumoniae, 50 | KLIKAINEELPTK | |
| PF-525 | A. niger, 50 | KFSDQIDKGQDALKDKLGDL | 1063 |
| | S. pneumoniae, 50 | | |
| PF-529 | A. niger, 50 | LSEMERRRLRKRA-NH2 | 1064 |
| | S. pneumoniae, 50 | | |
| PF-148 | A. niger, 50 | RRGCTERLRRMARRNAWDLYAEHFY | 1065 |
| | B. subtilis, 50 | | |
| PF-530 | A. baumannii, 25 | SKFKVLRKIIIKEYKGELMLSIQKQR | 1066 |
| PF-522 | C. difficile, 25 | FELVDWLETNLGKILKSKSA-NH2 | 1067 |
| PF-497 | B. subtilis, 50 | LVLRICTDLFTFIKWTIKQRKS | 1068 |
| PF-499 | B. subtilis, 50 | VYSFLYVLVIVRKLLSMKKRIERL | 1069 |
| PF-322 | B. subtilis, 50 | GIVLIGLKLIPLLANVLR | 1070 |
| PF-511 | S. pneumoniae, 50 | VMQSLYVKPPLILVTKLAQQN | 1071 |
| PF-512 | S. pneumoniae, 50 | SFMPEIQKNTIPTQMK | 1072 |
| PF-520 | S. pneumoniae, 50 | LGLTAGVAYAAQPTNQPTNQPTNQPTN | 1073 |
| | | QPTNQPTNQPRW-NH2 | |
| PF-521 | S. pneumoniae, 50 | CGKLLEQKNFFLKTR | 1074 |
| PF-523 | S. pneumoniae, 50 | ASKQASKQASKQASKQASKQASRSLKN | 1075 |
| | | HLL | |
| PF-524 | S. pneumoniae, 50 | PDAPRTCYHKPILAALSRIVVTDR | 1076 |
| PF-209 | MRSA , 50 | NYAVVSHT | 1077 |
| PF-437 | S. pneumoniae, 50 | FQKPFTGEEVEDFQDDDEIPTII | 1078 |

[0116] Where protecting groups are shown (e.g., —NH₂) they are optional. Conversely any peptide shown without protecting groups can bear one or more such groups.

[0117] In certain embodiments peptides that induce alterations in phenotype or other biological activities can also be used as antimicrobial effector moieties. Illustrative alternative peptides are shown in Table 5.

TABLE 5

Illustrative list of novel morphology, biofilm
and growth disrupting peptides.

| | | | SEQ ID |
|---|---|---|---|
| ID | Organism, effect | Structure/sequence | NO |
| G-1 | S. mutans: Ca2+ | DSSQSDSDSDSNSSNTNSNSSITNG | 1079 |
| | binding | | |
| G-2 | S. mutans: biofilm | LPGTLHIQAEFPVQLEAGSLIQIFD | 1080 |
| | structure | | |
| G-4 | S. mutans: | EIPIQLANDLANYYDISLDSIFFW | 1081 |
| | Biofilm structure | | |
| G-5 | M. xanthus: | RDMTVAGKRPNFLIITTDEE | 1082 |
| | Altered cell | | |
| | morphology | | |
| G-6 | M. xanthus: | NTSIVCAVTFAPIKEVPLLWRAGLTLRS | 1083 |
| | Altered cell | RQS | |
| | morphology | | |
| G-7 | M. xanthus: | QAKVEREVERDLVYTLRRLCDPSGSER | 1084 |
| | Altered cell | TK | |
| | morphology | | |
| G-8 | S. mutans: | PRMIDIISFHGCHGDHQVWTDPQATAL | 1085 |
| | Altered biofilm | PR | |
| | structure | | |
| PF-001 | S. epidermidis (C) | MNNWIIVAQLSVTVINEIIDIMKEKQKG | 1086 |
| | M. luteus (C) | GK | |
| | MRSA (R) | | |
| | C. jeikeium (D) | | |
| PF-002 | B. subtilis (R) | NDDAQ | 1087 |
| | S. pneumoniae (H) | | |
| PF-003 | S. epidermidis (D) | MNNWIKVAQISVTVINEVIDIMKEKQN | 1088 |
| | M. luteus (A) | GGK | |
| | MRSA (R) | | |
| | C. jeikeium (A) | | |
| PF-004 | S. epidermidis (A) | ARLSKAIIIAVIVVYHLDVRGLF | 1089 |
| | M. luteus (A) | | |
| | MRSA (R) | | |
| | C. jeikeium (A) | | |
| PF-005 | B. subtilis (C) | MESIFKIKLMNGICRSENMNMKKKNK | 1090 |
| | S. pneumoniae (H) | GEKI | |
| PF-006 | S. epidermidis (D) | MGIIAGIIKFIKGLIEKFTGK | 1091 |
| | M. luteus (A) | | |
| | B. subtilis (I) | | |
| | MRSA (I) | | |
| | S. pneumoniae (R) | | |
| | C. jejuni (D) | | |
| PF-007 | S. epidermidis (A) | MGIIAGIIKVIKSLIEQFTGK | 1092 |
| | M. luteus (A) | | |
| | E. coli (A) | | |
| | MRSA (R) | | |
| | E. faecalis (A) | | |
| PF-008 | B. subtilis (D) | MIEIGSIAYLNGGSKKYNHILNQENR | 1093 |
| | C. jejuni (R) | | |
| PF-009 | S. epidermidis (S) | SKKYNHILNQENR | 1094 |
| PF-010 | S. epidermidis (S) | MDIDVNKLLQAFVYFKSFEKLRHNNS | 1095 |
| | M. luteus (A) | | |
| | MRSA (R) | | |
| | C. jeikeium (A) | | |
| PF-011 | MRSA (R) | MFCYYKQHKGDNFSIEEVKNIIADNEM | 1096 |
| | C. jeikeium (C) | KVN | |
| PF-012 | S. epidermidis (S) | WRGPNTEAGGKSANNIVQVGGAPT | 1097 |
| | M. luteus (C) | | |
| | MRSA (R) | | |
| | C. jeikeium (A) | | |
| PF-013 | S. epidermidis (C) | LIQKGLNQTFIVVIRLNNFIKKS | 1098 |
| | M. luteus (D) | | |
| | MRSA (R) | | |
| | C. jeikeium (D) | | |
| PF-015 | MRSA (W) | SIDKRNLYNLKYYE | 1099 |
| PF-017 | MRSA (M) | ESIIE | 1100 |
| PF-019 | MRSA (M) | NDTNK | 1101 |
| PF-020 | S. mutans (F) | MKIILLLFLIFGFIVVVTLKSEHQLTLFSI | 1102 |
| | S. epidermidis (C) | | |
| | M. luteus (C) | | |
| | MRSA (C) | | |
| | S. pneumoniae (D) | | |
| PF-021 | S. epidermidis (A) | FSLNFSKQKYVTVN | 1103 |
| | M. luteus (A) | | |
| | MRSA (R) | | |
| | C. jeikeium (R) | | |
| PF-022 | S. epidermidis (D) | MINELKNKNSGIMNNYVVTKESKL | 1104 |
| | M. luteus (A) | | |
| | MRSA (R) | | |
| | C. jeikeium (A) | | |
| PF-023 | MRSA (S) | MTKNTIISLENEKTQINDSENESSDLRK | 1105 |
| | | AK | |
| PF-024 | S. epidermidis (D) | DLRKAK | 1106 |
| | MRSA (M) | | |
| PF-025 | S. epidermidis (S) | LLIIFRLWLELKWKNKK | 1107 |
| | M. luteus (A) | | |
| | MRSA (R) | | |
| | C. jeikeium (A) | | |
| PF-026 | MRSA (M) | SIHFIN | 1108 |
| PF-027 | S. epidermidis (D) | HNARKYLEFISQKIDGDKLTKEDSL | 1109 |
| | MRSA (M) | | |
| PF-028 | S. epidermidis (M) | ALDCSEQSVILWYETILDKIVGVIK | 1110 |
| | MRSA (R) | | |
| | C. jeikeium (M) | | |
| PF-029 | MRSA (M) | NSTNE | 1111 |
| PF-030 | S. epidermidis (D) | MTCHQAPTTTHQSNMA | 1112 |
| | M. luteus (C) | | |
| | MRSA (R) | | |
| | C. jeikeium (C) | | |
| PF-031 | MRSA (M) | MPHHSTTSSRIVVPAHQSNMASTPNLSI | 1113 |
| | | TP | |
| PF-032 | S. epidermidis (S) | RIVVPAHQSNMASTPNLSITP | 1114 |
| | C. jeikeium (C) | | |
| PF-033 | S. epidermidis (M) | MFIFKTTSKSHFHNNVKSLECIKIPINK | 1115 |
| | B. subtilis (C) | NR | |
| | MRSA (M) | | |
| | S. pneumoniae (R) | | |
| | C. jeikeium (D) | | |
| | C. jejuni (R) | | |
| PF-034 | S. epidermidis (A) | EPKKKHFPKMESASSEP | 1116 |
| PF-035 | MRSA (M) | SFYESY | 1117 |
| PF-036 | S. epidermidis (S) | ILNRLSRIVSNEVTSLIYSLK | 1118 |
| | M. luteus (A) | | |
| | MRSA (R) | | |
| | C. jeikeium (A) | | |
| PF-037 | S. epidermidis (D) | MTKKRRYDTTEFGLAHSMTAKITLHQ | 1119 |
| | M. luteus (C) | ALYK | |
| | MRSA (R) | | |
| | C. jeikeium (D) | | |
| PF-040 | S. mutans (F) | MIHLTKQNTMEALHFIKQFYDMFFILN | 1120 |
| | S. epidermidis (D) | FNV | |
| | M. luteus (D) | | |
| | B. subtilis (D) | | |
| | P. mirabilis (C) | | |
| | E. coli (C) | | |
| | MRSA (D) | | |
| | S. pneumoniae (D) | | |
| | C. jeikeium (D) | | |
| | C. jejuni (D) | | |
| PF-041 | S. epidermidis (R) | ELLVILPGFI | 1121 |
| | MRSA (M) | | |
| PF-042 | S. epidermidis (D) | LLLSYFRYTGALLQSLF | 1122 |
| | M. luteus (C) | | |
| | MRSA (R) | | |
| | C. jeikeium (S) | | |
| PF-043 | S. epidermidis (D) | MIKNETAYQMNELLVIRSAYAK | 1123 |
| | M. luteus (C) | | |
| | MRSA (R) | | |
| | C. jeikeium (A) | | |
| PF-045 | MRSA (S) | LDINDYRSTY | 1124 |
| PF-046 | S. epidermidis (C) | LDFYLTKHLTLML | 1125 |
| | MRSA (R) | | |
| | C. jeikeium (R) | | |
| PF-048 | S. epidermidis (D) | LYFAFKKYQERVNQAPNIEY | 1126 |
| | MRSA (W) | | |
| | C. jeikeium (S) | | |
| PF-049 | MRSA (S) | AYYLKRREEKGK | 1127 |
| PF-051 | S. mutans (D) | RFFNFEIKKSTKVDYVFAHVDLSDV | 1128 |
| | S. epidermidis (D) | | |
| | M. luteus (C) | | |
| | MRSA (D) | | |
| | S. pneumoniae (D) | | |
| PF-052 | S. epidermidis (S) | QELINEAVNLLVKSK | 1129 |
| | M. luteus (A) | | |
| | MRSA (R) | | |
| | C. jeikeium (D) | | |
| PF-053 | S. epidermidis (C) | KLFGQWGPELGSIYILPALIGSIILIAIVT | 1130 |
| | M. luteus (D) | LILRAMRK | |
| | B. subtilis (H) | | |
| | E. coli (A) | | |
| | P. aeruginosa (A) | | |
| | C. albicans (A) | | |
| | MRSA (D) | | |
| | S. pneumoniae (S) | | |
| | E. faecalis (A) | | |
| | C. jeikeium (D) | | |
| | C. jejuni (D) | | |
| PF-056 | S. epidermidis (D) | AEQLFGKQKQRGVDLFLNRLTIILSILF | 1131 |
| | M. luteus (D) | FVLMICISYLGM | |
| | B. subtilis (C) | | |
| | C. albicans (B) | | |
| | MRSA (M) | | |
| | S. pneumoniae (D) | | |
| | C. jeikeium (S) | | |
| | C. jejuni (D) | | |
| PF-057 | S. epidermidis (D) | TMIVISIPRFEEYMKARHKKWM | 1132 |
| | M. luteus (C) | | |
| | E. coli (M) | | |
| | C. albicans (A) | | |
| | MRSA (M) | | |
| | S. pneumoniae (R) | | |
| | E. faecalis (A) | | |
| | C. jeikeium (A) | | |
| | C. jejuni (D) | | |
| PF-058 | MRSA (M) | FADQSQDNA | 1133 |
| PF-059 | C. jejuni (C) | TITLKAGIERALHEEVPGVIEVEQVF | 1134 |
| PF-061 | S. epidermidis (R) | GYNSYKAVQDVKTHSEEQRVTAKK | 1135 |
| | B. subtilis (R) | | |
| | S. pneumoniae (R) | | |
| | C. jejuni (R) | | |
| PF-063 | S. epidermidis (R) | IAAIIVLVLFQKGLLQIFNWILIQLQ | 1136 |
| | M. luteus (R) | | |
| | B. subtilis (C) | | |
| | P. aeruginosa (A) | | |
| | MRSA (M) | | |
| | S. pneumoniae (D) | | |
| | C. jeikeium (D) | | |
| | C. jejuni (D) | | |
| PF-064 | S. epidermidis (D) | DYYGKE | 1137 |
| | MRSA (M) | | |
| PF-065 | S. epidermidis (D) | LEKNTRDNYFIHAIDRIYINTSKGLFPES | 1138 |
| | MRSA (R) | ELVAWG | |
| | C. jeikeium (A) | | |
| PF-066 | MRSA (S) | IKGTVKAVDETTVVITVNGHGTELTFE | 1139 |
| | | KPAIKQVDPS | |
| PF-067 | S. epidermidis (D) | DLIVKVHICFVVKTASGYCYLNKREAQ | 1140 |
| | M. luteus (R) | AAI | |
| | B. subtilis (C) | | |
| | P. aeruginosa (A) | | |
| | MRSA (M) | | |
| | S. pneumoniae (D) | | |
| | C. jeikeium (D) | | |
| | C. jejuni (D) | | |
| PF-068 | S. epidermidis (M) | SHLINNFGLSVINPSTPICLNFSPVFNLL | 1141 |
| | M. luteus (D) | TVYGITCN | |
| | B. subtilis (A) | | |
| | E. coli (A) | | |
| | MRSA (M) | | |
| | S. pneumoniae (D) | | |
| | E. faecalis (A) | | |
| | C. jeikeium (R) | | |
| | C. jejuni (D) | | |
| PF-069 | B. subtilis (D) | FDPVPLKKDKSASKHSHKHNH | 1142 |
| | C. jejuni (R) | | |
| PF-070 | B. subtilis (D) | SMVKSEIVDLLNGEDNDD | 1143 |
| PF-071 | S. epidermidis (R) | HCVIGNVVDIANLLKRRAVYRDIADVI | 1144 |
| | M. luteus (R) | KMR | |
| | B. subtilis (D) | | |
| | C. albicans (B) | | |
| | MRSA (C) | | |
| | S. pneumoniae (A) | | |
| | C. jejuni (A) | | |
| PF-073 | S. epidermidis (R) | CPSVTMDACALLQKFDFCNNISHFRHF | 1145 |
| | M. luteus (R) | FAIKQPIER | |
| | MRSA (M) | | |
| | S. pneumoniae (D) | | |
| | C. jeikeium (D) | | |
| | C. jejuni (D) | | |
| PF-074 | S. epidermidis (D) | RDIHPIYFMTKD | 1146 |
| | MRSA (M) | | |
| PF-075 | S. epidermidis (D) | FVNSLIMKDLSDNDMRFKYEYYNREK | 1147 |
| | M. luteus (A) | DT | |
| | MRSA (R) | | |
| | C. jeikeium (D) | | |
| PF-076 | S. epidermidis (S) | LYQYELLSKEEYLKCTLIINQRRNEQK | 1148 |
| | M. luteus (A) | | |
| | MRSA (R) | | |
| | C. jeikeium (A) | | |
| PF-099 | S. epidermidis (D) | EIIAYLEGRFANA | 1149 |
| | C. jeikeium (C) | | |
| PF-123 | S. epidermidis (M) | TTRPQVAEDRQLDDALKETFPASDPISP | 1150 |
| PF-124 | S. epidermidis (C) | MADGQIAAIAKLHGVPVATRNIRHFQS | 1151 |
| | C. jeikeium (R) | FGVELINPWSG | |
| PF-125 | S. epidermidis (D) | YVVGALVILAVAGLIYSMLRKA | 1152 |
| | M. luteus (C) | | |
| PF-127 | S. epidermidis (M) | MLRYLSLFAVGLATGYAWGWIDGLA | 1153 |
| | M. luteus (A) | ASLAV | |
| | C. jeikeium (A) | | |
| PF-128 | S. epidermidis (D) | GIKVVAARFEEIQFSENFDSIILA | 1154 |
| | P. aeruginosa (C) | | |
| PF-129 | S. epidermidis (M) | MKLLARDPWVCAWNDIW | 1155 |
| | C. jeikeium (R) | | |
| PF-133 | C. jeikeium (R) | GDPTAGQKPVECP | 1156 |
| PF-135 | C. jeikeium (R) | PPARPARIPQTPTLHGASLFRQRS | 1157 |
| PF-137 | S. epidermidis (D) | VLGKGHDLLDVGKTALKSRVFAWLG | 1158 |
| | M. luteus (D) | GS | |
| | C. jeikeium (A) | | |
| PF-139 | S. epidermidis (M) | ALSKPAIQARTLCRRQDPP | 1159 |
| | M. luteus (C) | | |
| | C. jeikeium (R) | | |
| PF-140 | S. epidermidis (D) | FHRRVIRASEWALTTRSFSTPLRSAAR | 1160 |
| | M. luteus (R) | | |
| | P. aeruginosa (A) | | |
| | C. albicans (B) | | |
| | MRSA (M) | | |
| | S. pneumoniae (D) | | |
| | C. jeikeium (D) | | |
| | C. jejuni (D) | | |
| PF-143 | P. aeruginosa (C) | LSPRPIIVSRRSRADNNNDWSR | 1161 |
| PF-144 | S. pneumoniae (H) | RSGQPVGRPSRRAWLR | 1162 |
| PF-145 | S. epidermidis (D) | GIVLTGRAGLVSGACSMALGVGLG | 1163 |
| | M. luteus (A) | | |
| | B. subtilis (C) | | |
| | MRSA (M) | | |
| | S. pneumoniae (R) | | |
| | C. jeikeium (R) | | |
| | C. jejuni (R) | | |
| PF-148 | S. epidermidis (D) | RRGCTERLRRMARRNAWDLYAEHFY | 1164 |
| | M. luteus (A) | | |
| | B. subtilis (I) | | |
| | C. albicans (B) | | |
| | MRSA (C) | | |
| | S. pneumoniae (R) | | |
| | C. jeikeium (H) | | |
| | C. jejuni (H) | | |
| PF-149 | MRSA (H) | GKVSVLTRVPRSLGGAPANQ | 1165 |
| PF-153 | S. epidermidis (M) | GILARADCSQIA | 1166 |
| | C. jeikeium (C) | | |
| PF-156 | MRSA (H) | LITAEQPATAPIAGK | 1167 |
| PF-157 | S. epidermidis (M) | HTAVVWLAGVSGCVALSHCEPA | 1168 |
| PF-164 | C. jeikeium (R) | EEVSRALAGIGLGLGCRIG | 1169 |
| PF-168 | P. aeruginosa (H) | VLPFPAIPLSRRRACVAAPRPRSRQRAS | 1170 |
| | MRSA (I) | | |
| PF-171 | S. epidermidis (R) | TQVTLCRTW | 1171 |
| | M. luteus (R) | | |
| | B. subtilis (D) | | |
| | MRSA (M) | | |
| | S. pneumoniae (D) | | |
| | C. jejuni (R) | | |
| PF-173 | S. epidermidis (A) | AGRTAIVQGGG | 1172 |
| | C. jeikeium (D) | | |
| PF-175 | M. luteus (S) | RRRPAGQRPEKASQAMIAA | 1173 |
| | B. subtilis (D) | | |
| | C. albicans (B) | | |
| | S. pneumoniae (A) | | |
| | C. jejuni (M) | | |
| PF-176 | S. epidermidis (C) | RLTSNQFLTRITPFVFAQH | 1174 |
| | M. luteus (C) | | |
| | C. jeikeium (D) | | |
| PF-178 | S. epidermidis (D) | EVYSSPTNNVAITVQNN | 1175 |
| | E. coli (C) | | |
| | MRSA (M) | | |
| | S. pneumoniae (D) | | |
| PF-180 | S. epidermidis (C) | SGLGDLGFSSEAK | 1176 |
| PF-186 | S. epidermidis (C) | DADKNLSLERDRFAWRVAAP | 1177 |
| | C. jeikeium (A) | | |
| PF-188 | C. jeikeium (H) | ARTFAGRLGTRYFGGLMRSTKA | 1178 |
| PF-190 | S. epidermidis (C) | HFILRKPLLFMIHSLKTGPLDRF | 1179 |
| | C. jeikeium (R) | | |
| PF-191 | S. epidermidis (A) | QFCNFAWLFLASNNAQVSALA | 1180 |
| | MRSA (H) | | |
| | C. jeikeium (R) | | |
| PF-192 | S. epidermidis (D) | VEEDEAPPPHY | 1181 |
| PF-196 | S. epidermidis (C) | TTARYIRRQCHTSITPLSQG | 1182 |
| | C. jeikeium (R) | | |
| PF-199 | S. epidermidis (C) | FPAFSFGAIAGSVSVAR | 1183 |
| | M. luteus (A) | | |
| | C. jeikeium (R) | | |
| PF-203 | S. epidermidis (A) | SWKCHHLAI | 1184 |
| | C. jeikeium (R) | | |
| PF-204 | S. epidermidis (C) | ALQKQDMNLPSVKNQLVFLKSTG | 1185 |
| | M. luteus (C) | | |
| | P. aeruginosa (H) | | |
| | C. jeikeium (D) | | |
| PF-208 | S. epidermidis (D) | DAYHCHLVRSPDAHDLSMRIGFV | 1186 |
| | C. jeikeium (A) | | |
| PF-209 | S. epidermidis (C) | NYAVVSHT | 1187 |
| | P. aeruginosa (H) | | |
| | MRSA (I) | | |
| PF-212 | M. luteus (M) | NDSKASN | 1188 |
| PF-215 | M. luteus (T) | ELKITNYNVNTVLYRYYKWGNDLCE | 1189 |
| PF-220 | S. pneumoniae (H) | VDPADDGTRHIRPEDGDPIEIDE | 1190 |
| PF-224 | M. luteus (T) | DYFYITLSQKNTF | 1191 |
| PF-226 | S. epidermidis (C) | LMFFSENMDKRDTLSGKFRYFAGSKVI | 1192 |
| | M. luteus (T) | KLMNWLSENGK | |
| PF-233 | S. epidermidis (C) | DANAMARTTIAIVYILALIALTISYSL | 1193 |
| PF-234 | M. luteus (T) | RTPYILRS | 1194 |
| PF-235 | M. luteus (T) | GIPFSKPHKRQVNYMKSDVLAYIEQNK | 1195 |
| | | MAHTA | |
| PF-249 | M. luteus (R) | INSRYKISF | 1196 |
| PF-250 | M. luteus (T) | SEDIFGRLANEKANGLEELRKIRLKQ | 1197 |
| PF-255 | M. luteus (M) | DHKINESQHNPFRSDSNKQNVDFF | 1198 |
| PF-257 | M. luteus (R) | VWENRKKYLENEIERHNVFLKLGQEVI | 1199 |
| | | KGLNALASRGR | |
| PF-264 | M. luteus (H) | MQSLSNRQSLIASYILMGIFLSFGYPPA | 1200 |
| | | SLSKFFCRLSHL | |
| PF-270 | M. luteus (H) | MYLTPYAWIAVGSIFAFSVTTIKIGDQN | 1201 |
| | | DEKQKSHKNDVHKR | |
| PF-271 | M. luteus (T) | AAQPQTTSP | 1202 |
| PF-273 | S. epidermidis (C) | LVGALLIFVALIYMVLKGNADKN | 1203 |
| PF-274 | M. luteus (M) | SIQEAEKIIKNDPFYIHDVADYDFMWF | 1204 |
| | | EPSKSLEEIKEFV | |
| PF-276 | M. luteus (M) | LDLALSTNSLNLEGFSF | 1205 |
| PF-278 | S. epidermidis (I) | LSLATFAKIFMTRSNWSLKRFNRL | 1206 |
| | M. luteus (R) | | |
| | C. albicans (B) | | |
| PF-283 | S. epidermidis (H) | MIRIRSPTKKKLNRNSISDWKSNTSGRF | 1207 |
| | B. subtilis (H) | FY | |
| PF-289 | B. subtilis (C) | MGRHLWNPSYFVATVSENTEEQIRKY | 1208 |
| | | RKNK | |
| PF-290 | S. epidermidis (C) | MVHDMTNGTLIIVKH | 1209 |
| PF-292 | S. epidermidis (C) | SFVSTTVRLIFEESKRYKF | 1210 |
| | B. subtilis (C) | | |
| PF-293 | S. epidermidis (C) | YDPLK | 1211 |
| PF-294 | S. epidermidis (C) | DFLVNFLWFKGELNWGKKRYK | 1212 |
| PF-296 | S. epidermidis (C) | GAFGMPSIKTNTICGEKGKFISACDAW | 1213 |
| | B. subtilis (C) | LSNLK | |
| PF-297 | S. epidermidis (C) | ISKGIDDIVYVINKILSIGNIFKIIKRK | 1214 |
| | B. subtilis (C) | | |
| PF-301 | S. epidermidis (C) | GIVLIGLKLIPLLANVLN | 1215 |
| | B. subtilis (C) | | |
| PF-303 | B. subtilis (C) | EYPWSWISEPWPWDKSFYK | 1216 |
| PF-305 | B. subtilis (C) | MREWICPSCNETHDRDINASINILKEGL | 1217 |
| | | RLITIQNK | |
| PF-306 | B. subtilis (C) | GCILPHKKDNYNYIMSKFQDLVKITSKK | 1218 |
| PF-307 | S. epidermidis (T) | MKRRRCNWCGKLFYLEEKSKEAYCC | 1219 |
| | B. subtilis (H) | KECRKKAKKVKK | |
| | C. albicans (B) | | |
| PF-310 | S. epidermidis (C) | GVALIGTILVPLLSGLFG | 1220 |
| PF-313 | S. epidermidis (C) | YITSHKNARAIIKKFERDEILEEVITHYL | 1221 |
| | | NRK | |
| PF-318 | S. epidermidis (C) | MGRHLWNPSYFVATVSENTEEQIRKYI | 1222 |
| | B. subtilis (C) | NNQKKQVK | |
| PF-319 | S. epidermidis (C) | SIGSMIGMYSFRHKTKHIKFTFGIPFILF | 1223 |
| | B. subtilis (C) | LQFLLVYFYILK | |
| PF-322 | S. epidermidis (C) | GIVLIGLKLIPLLANVLR | 1224 |
| | B. subtilis (H) | | |
| PF-335 | S. epidermidis (C) | AAYPIEDWSDWYEDFFIMLSNI | 1225 |
| | B. subtilis (C) | | |
| PF-339 | S. epidermidis (C) | KKIDILINKYMYLSK | 1226 |
| | B. subtilis (C) | | |
| PF-342 | S. epidermidis (C) | AFSGVYKTLIVYTRRK | 1227 |
| | B. subtilis (C) | | |
| PF-344 | E. coli (A) | DERLPEAKAIRNFNGSVMVLGR | 1228 |
| PF-347 | S. epidermidis (C) | GIFTGVTVVVSLKHC | 1229 |
| | E. coli (C) | | |
| | MRSA (C) | | |
| | E. faecalis (C) | | |
| PF-349 | S. epidermidis (C) | MPKSCHVPVLCDFFFLVIIKFLALFKTI | 1230 |
| | E. coli (C) | QS | |
| | MRSA (C) | | |
| | E. faecalis (C) | | |
| PF-350 | S. epidermidis (C) | LAVILRAIVY | 1231 |
| | E. coli (C) | | |
| | MRSA (C) | | |
| PF-354 | MRSA (H) | FTFSKCRASNGRGFGTLWL | 1232 |
| PF-355 | S. epidermidis (C) | WIAIGLLLYFSLKNQ | 1233 |
| | E. coli (C) | | |
| | P. aeruginosa (A) | | |
| | MRSA (A) | | |
| | S. pneumoniae (D) | | |
| | E. faecalis (D) | | |
| | C. jejuni (D) | | |
| PF-356 | S. epidermidis (S) | VSIKIGAIVIGMIGLMELLTE | 1234 |
| | P. aeruginosa (A) | | |
| | MRSA (C) | | |
| | S. pneumoniae (R) | | |
| | E. faecalis (R) | | |
| | C. jejuni (D) | | |
| PF-357 | S. epidermidis (M) | MLTIIIGFIFWTMTLMLGYLIGEREGRK | 1235 |
| | M. luteus (C) | HE | |
| | MRSA (M) | | |
| | S. pneumoniae (M) | | |
| PF-360 | S. epidermidis (S) | MEQKVKVIFVPRSKPDNQLKTFVSAVL | 1236 |
| | E. coli (C) | FKA | |
| | MRSA (H) | | |
| PF-362 | E. coli (C) | NIERILKEKVWMIRCVE | 1237 |
| | MRSA (C) | | |
| PF-363 | S. epidermidis (S) | SMLSVTVMCLMHASVAANQAMEKKV | 1238 |
| | E. coli (C) | | |
| | MRSA (H) | | |
| | S. pneumoniae (R) | | |
| | E. faecalis (D) | | |
| | C. jejuni (D) | | |
| PF-366 | S. epidermidis (R) | ALCSVIKAIELGIINVHLQ | 1239 |
| | E. coli (C) | | |
| | P. aeruginosa (A) | | |
| | MRSA (D) | | |
| | S. pneumoniae (C) | | |
| | E. faecalis (C) | | |
| | C. jejuni (D) | | |
| PF-369 | S. epidermidis (S) | MSEAVNLLRGARYSQRYAKNQVPYEV | 1240 |
| | E. coli (R) | IIEK | |
| | MRSA (H) | | |
| | E. faecalis (C) | | |
| PF-370 | S. epidermidis (C) | VIFLHKESGNLKEIFY | 1241 |
| | E. coli (R) | | |
| | MRSA (C) | | |
| PF-373 | S. epidermidis (M) | HFYLLFER | 1242 |
| | MRSA (M) | | |
| PF-374 | S. epidermidis (C) | HLFFVKGMFILCQKNQINDE | 1243 |
| | E. coli (C) | | |
| | MRSA (M) | | |
| | E. faecalis (C) | | |
| PF-375 | S. epidermidis (C) | MDSAKAQTMRTDWLAVSCLVASAYL | 1244 |
| | E. coli (C) | RSMLA | |
| | MRSA (C) | | |
| | E. faecalis (C) | | |
| PF-376 | S. epidermidis (C) | MTVFEALMLAIAFATLIVKISNKNDKK | 1245 |
| | E. coli (C) | | |
| | MRSA (C) | | |
| | E. faecalis (C) | | |
| PF-378 | S. epidermidis (M) | ESAKSNLNFLMQEEWALFLLL | 1246 |
| | MRSA (M) | | |
| PF-379 | S. epidermidis (C) | VFVVLFIIYLASKLLTKLFPIKK | 1247 |
| | E. coli (C) | | |
| | MRSA (C) | | |
| | E. faecalis (C) | | |
| PF-380 | S. epidermidis (C) | KKIIPLITLFVVTLVG | 1248 |
| | E. coli (C) | | |
| | P. aeruginosa (A) | | |
| | MRSA (D) | | |
| | S. pneumoniae (D) | | |
| | E. faecalis (C) | | |
| | C. jejuni (D) | | |
| PF-381 | S. epidermidis (C) | QGANPCQQVGFTVNDPDCRLAKTV | 1249 |
| | E. coli (R) | | |
| | MRSA (C) | | |
| | E. faecalis (C) | | |
| PF-382 | MRSA (M) | KYKCSWCKRVYTLRKDHKTAR | 1250 |
| PF-383 | S. epidermidis (C) | WSEIEINTKQSN | 1251 |
| | E. coli (R) | | |
| PF-385 | E. coli (A) | MIKKSILKIKYYVPVLISLTLILSA | 1252 |
| PF-386 | S. epidermidis (C) | FTLTLITTIVAILNYKDKKK | 1253 |
| | E. coli (C) | | |
| | MRSA (C) | | |
| | E. faecalis (C) | | |
| PF-387 | S. epidermidis (C) | GAVGIAFFAGNMKQDKRIADRQNKKS | 1254 |
| | E. coli (M) | EKK | |
| | MRSA (C) | | |
| | E. faecalis (C) | | |
| PF-389 | S. epidermidis (R) | GLQFKEIAEEFHITTTALQQWHKDNGY | 1255 |
| | MRSA (C) | PIYNKNNRK | |
| | S. pneumoniae (D) | | |
| | E. faecalis (R) | | |
| | C. jejuni (R) | | |
| PF-390 | S. epidermidis (D) | VVAYVITQVGAIRF | 1256 |
| | E. coli (C) | | |
| | MRSA (D) | | |
| | S. pneumoniae (D) | | |
| | E. faecalis (D) | | |
| | C. jejuni (D) | | |
| PF-392 | MRSA (S) | DPAGCNDIVRKYCK | 1257 |
| | E. faecalis (A) | | |
| | C. jejuni (A) | | |
| PF-393 | S. epidermidis (R) | DLVQSILSEFKKSG | 1258 |
| | MRSA (C) | | |
| | S. pneumoniae (R) | | |
| | E. faecalis (A) | | |
| | C. jejuni (R) | | |
| PF-394 | MRSA (C) | VLKEECYQKN | 1259 |
| | E. faecalis (A) | | |
| PF-395 | S. epidermidis (C) | YCVPLGNMGNMNNKIW | 1260 |
| | E. coli (R) | | |
| | MRSA (C) | | |
| PF-396 | S. epidermidis (S) | LIYTILASLGVLTVLQAILGREPKAVKA | 1261 |
| | E. coli (C) | | |
| | MRSA (C) | | |
| | E. faecalis (C) | | |
| PF-397 | S. epidermidis (C) | VEDLMEDLNA | 1262 |
| PF-398 | S. epidermidis (C) | ILVVLAGILLVVLSYVGISKFKMNC | 1263 |
| | E. coli (C) | | |
| | MRSA (C) | | |
| | E. faecalis (C) | | |
| PF-399 | S. epidermidis (C) | FPIISALLGAIICIAIYSFIVNRKA | 1264 |
| | E. coli (C) | | |
| | MRSA (C) | | |
| | E. faecalis (C) | | |
| PF-401 | S. epidermidis (C) | YWLSRVTTGHSFAFEKPVPLSLTIK | 1265 |
| | E. coli (R) | | |
| | MRSA (C) | | |
| | E. faecalis (C) | | |
| PF-403 | S. epidermidis (M) | LLSTEQLLKYYDGETFDGFQLPSNE | 1266 |
| | E. coli (R) | | |
| | MRSA (M) | | |
| PF-404 | S. epidermidis (M) | VLYFQATVV | 1267 |
| | MRSA (M) | | |
| PF-405 | MRSA (M) | LVRIEVDDLEEWYERNFI | 1268 |
| PF-406 | S. epidermidis (C) | YLEMNADYLSNMDIFDELWEKYLENNK | 1269 |
| | MRSA (M) | | |
| PF-407 | S. epidermidis (M) | KPKNKKEKTVISYEKLLSMY | 1270 |
| | MRSA (C) | | |
| | S. pneumoniae (R) | | |
| | E. faecalis (R) | | |
| PF-408 | S. epidermidis (M) | YCVPLGNMGNMNNKIW | 1271 |
| | MRSA (M) | | |
| PF-410 | S. epidermidis (C) | FALELIALCRNLFIVYFP | 1272 |
| | E. coli (S) | | |
| | MRSA (M) | | |
| | E. faecalis (C) | | |
| PF-411 | S. epidermidis (C) | WVAVAILLNIALQTQLT | 1273 |
| | E. coli (C) | | |
| | P. aeruginosa (A) | | |
| | MRSA (D) | | |
| | S. pneumoniae (D) | | |
| | E. faecalis (D) | | |
| | C. jejuni (D) | | |
| PF-413 | S. epidermidis (C) | TFAGSIKIGVPDLVHVTFNCKR | 1274 |
| | E. coli (S) | | |
| | MRSA (C) | | |
| PF-414 | S. pneumoniae (H) | LLNKKLE | 1275 |
| PF-415 | S. pneumoniae (D) | MIDVTIGQKSKTGAFNASYSICFSGENF | 1276 |
| | | SF | |
| PF-416 | S. pneumoniae (H) | SKAGLYGKIERSDKRE | 1277 |
| PF-417 | S. epidermidis (M) | DSYFRS | 1278 |
| | MRSA (M) | | |
| | S. pneumoniae (M) | | |
| PF-418 | S. epidermidis (M) | FFLVHFYIRKRKGKVSIFLNYF | 1279 |
| | E. coli (C) | | |
| | MRSA (D) | | |
| | S. pneumoniae (D) | | |
| | E. faecalis (D) | | |
| | C. jejuni (D) | | |
| PF-419 | S. pneumoniae (H) | VVTGKVGSLPQIK | 1280 |
| PF-421 | S. pneumoniae (H) | KHCFEITDKTDVV | 1281 |
| PF-422 | S. epidermidis (R) | MSRKKYENDEKSQKKLKIGRKSDVFY | 1282 |
| | MRSA (C) | GIID | |
| | S. pneumoniae (C) | | |
| | E. faecalis (R) | | |
| | C. jejuni (R) | | |
| PF-423 | S. pneumoniae (H) | AGKKERLLSFREQFLNKNKKK | 1283 |
| PF-424 | S. pneumoniae (H) | IAAFVTSRAFSDTVSPI | 1284 |
| PF-425 | S. epidermidis (D) | MMELVLKTIIGPIVVGVVLRIVDKWLN | 1285 |
| | E. coli (C) | KDK | |
| | P. aeruginosa (A) | | |
| | C. albicans (A) | | |
| | MRSA (D) | | |
| | S. pneumoniae (D) | | |
| | E. faecalis (D) | | |
| | C. jejuni (D) | | |
| PF-426 | S. epidermidis (D) | MLQKYTQMISVTKCIITKNKKTQENVD | 1286 |
| | E. coli (C) | AYN | |
| | C. albicans (A) | | |
| | MRSA (D) | | |
| | S. pneumoniae (D) | | |
| | E. faecalis (D) | | |
| | C. jejuni (D) | | |
| PF-427 | E. coli (C) | YVLEYHGLRATQDVDAFMAL | 1287 |
| | MRSA (C) | | |
| | S. pneumoniae (R) | | |
| | E. faecalis (C) | | |
| PF-428 | S. pneumoniae (H) | ENEESIF | 1288 |
| PF-429 | S. epidermidis (C) | AATLICVGSGIMSSL | 1289 |
| | MRSA (C) | | |
| | S. pneumoniae (M) | | |
| | E. faecalis (C) | | |
| PF-430 | S. epidermidis (M) | AVVCGYLAYTATS | 1290 |
| | MRSA (M) | | |
| | S. pneumoniae (M) | | |
| PF-431 | S. epidermidis (M) | VAYAAICWW | 1291 |
| | MRSA (C) | | |
| | S. pneumoniae (R) | | |
| | E. faecalis (R) | | |
| | C. jejuni (R) | | |
| PF-432 | S. epidermidis (M) | FNGDSEFFLCIAF | 1292 |
| | E. coli (R) | | |
| | P. aeruginosa (A) | | |
| | MRSA (M) | | |
| | S. pneumoniae (D) | | |
| | E. faecalis (D) | | |
| | C. jejuni (D) | | |
| PF-433 | S. pneumoniae (H) | MRKEFHNVLSSGQLLADKRPARDYNRK | 1293 |
| PF-434 | S. pneumoniae (S) | GQLLADKRPARDYNRK | 1294 |
| PF-437 | S. pneumoniae (I) | FQKPFTGEEVEDFQDDDEIPTII | 1295 |
| PF-439 | S. epidermidis (C) | RVLVLKKFHGIMDGNRNVAVFFVGQ | 1296 |
| | E. coli (R) | | |
| | MRSA (M) | | |
| | S. pneumoniae (R) | | |
| | E. faecalis (C) | | |
| PF-440 | S. epidermidis (C) | MFIISPDLFNIAVILYILFFIHDILLLILS | 1297 |
| | E. coli (R) | | |
| | MRSA (C) | | |
| | S. pneumoniae (R) | | |
| | E. faecalis (C) | | |
| PF-442 | MRSA (M) | MQIFYIKTKIFLSFFLFLLIFSQCFYKIEE | 1298 |
| | S. pneumoniae (C) | | |
| PF-443 | E. coli (R) | KLLYFFNYFENLQQVHLLVQL | 1299 |
| | MRSA (C) | | |
| | S. pneumoniae (C) | | |
| PF-444 | S. epidermidis (C) | MAAKLWEEGKMVYASSASMTKRLKL | 1300 |
| | E. coli (R) | AMSKV | |
| | MRSA (C) | | |
| | S. pneumoniae (R) | | |
| | E. faecalis (C) | | |
| PF-445 | S. pneumoniae (M) | ASMTKRLKLAMSKV | 1301 |
| PF-446 | S. pneumoniae (H) | SGNEKV | 1302 |
| PF-447 | S. epidermidis (C) | IDKSRNKDQFSHIFGLYNICSG | 1303 |
| | MRSA (C) | | |
| | S. pneumoniae (C) | | |
| | E. faecalis (C) | | |
| PF-448 | S. pneumoniae (I) | SLQSQLGPCLHDQRH | 1304 |
| PF-449 | S. pneumoniae (H) | MPTTKSKQKGWTNTKKASNTQ | 1305 |
| PF-450 | MRSA (C) | HRNLIILQRTIFI | 1306 |
| | S. pneumoniae (C) | | |
| | E. faecalis (C) | | |
| PF-451 | S. epidermidis (C) | MVNYIIGSYMLYREQNNNEALRKFDIT | 1307 |
| | E. coli (R) | LAM | |
| | MRSA (C) | | |
| | S. pneumoniae (C) | | |
| | E. faecalis (C) | | |
| PF-452 | S. epidermidis (C) | MNNWIKVAQISVTVINEVIDIMKEKQN | 1308 |
| | E. coli (C) | GGK | |
| | MRSA (C) | | |
| | S. pneumoniae (R) | | |
| | E. faecalis (C) | | |
| PF-453 | S. epidermidis (C) | IIQDIAHAFGY | 1309 |
| | E. coli (C) | | |
| | MRSA (C) | | |
| | S. pneumoniae (C) | | |
| PF-454 | S. epidermidis (C) | MSVFVPVTNIFMFIMSPIFNVNLLHFKV | 1310 |
| | E. coli (R) | YI | |
| | P. aeruginosa (H) | | |
| | MRSA (C) | | |
| | S. pneumoniae (R) | | |
| | E. faecalis (C) | | |
| PF-455 | S. pneumoniae (A) | MARNDDDIKKIKGTLGQSPEVYGERK | 1311 |
| | | LPYT | |
| PF-456 | E. faecalis (A) | TCVKPRTIN | 1312 |
| | C. jejuni (A) | | |
| PF-457 | S. pneumoniae (M) | INKYHHIA | 1313 |
| PF-458 | P. aeruginosa (H) | ISLIIFIMLFVVALFKCITNYKHQS | 1314 |
| | MRSA (M) | | |
| | S. pneumoniae (M) | | |
| PF-459 | S. pneumoniae (H) | EKRMSFNENQSHRPLL | 1315 |
| PF-460 | S. epidermidis (C) | MEHVLPFQNTPPNIVIIYKDFTHLKSITFS | 1316 |
| | E. coli (H) | | |
| | MRSA (C) | | |
| | S. pneumoniae (R) | | |
| | E. faecalis (C) | | |
| PF-461 | MRSA (R) | MTLAIKNCSVTKCLGFGDFVNDDSDS | 1317 |
| | S. pneumoniae (R) | YFDA | |
| | E. faecalis (A) | | |
| PF-462 | S. pneumoniae (H) | KNKTDTL | 1318 |
| PF-464 | S. pneumoniae (S) | VDMVNRFLGN | 1319 |
| PF-465 | S. pneumoniae (H) | KPVGKALEEIADGKIEPVVPKEYLG | 1320 |
| PF-466 | S. pneumoniae (H) | VRKSDQ | 1321 |
| PF-467 | S. pneumoniae (H) | YYKDYFKEI | 1322 |
| PF-468 | S. pneumoniae (H) | EDNKDKKDKKDK | 1323 |
| PF-469 | S. epidermidis (D) | YKVNYNNIDNHFNTLRH | 1324 |
| | E. coli (C) | | |
| | MRSA (D) | | |
| | S. pneumoniae (D) | | |
| | E. faecalis (D) | | |
| | C. jejuni (D) | | |
| PF-470 | E. faecalis (A) | PYSDSYATRPHWEQHRAR | 1325 |
| | C. jejuni (A) | | |
| PF-471 | S. epidermidis (C) | MVGKIRGVTPRNDLLNANITGQLNLN | 1326 |
| | E. coli (C) | YRLI | |
| | P. aeruginosa (A) | | |
| | MRSA (D) | | |
| | S. pneumoniae (D) | | |
| | E. faecalis (C) | | |
| | C. jejuni (D) | | |
| PF-472 | MRSA (C) | MHISHLLDEVEQTEREKAVNVLENMN | 1327 |
| | S. pneumoniae (R) | GNVI | |
| | E. faecalis (A) | | |
| | C. jejuni (R) | | |
| PF-473 | S. epidermidis (R) | MAADIISTIGDLVKWIIDTVNKFKK | 1328 |
| | E. coli (C) | | |
| | MRSA (C) | | |
| | S. pneumoniae (H) | | |
| | E. faecalis (R) | | |
| | C. jejuni (R) | | |
| PF-474 | S. epidermidis (C) | MHRNLVLVKMEPIPHIMIIANQIGIIIEKA | 1329 |
| | E. coli (C) | | |
| | P. aeruginosa (A) | | |
| | C. albicans (B) | | |
| | MRSA (D) | | |
| | S. pneumoniae (D) | | |
| | E. faecalis (C) | | |
| | C. jejuni (D) | | |
| PF-475 | S. epidermidis (M) | MREKVRFTQAFKLFWTNYFNFKGRSR | 1330 |
| | C. albicans (B) | RSEY | |
| | MRSA (S) | | |
| | S. pneumoniae (R) | | |
| | E. faecalis (R) | | |
| | C. jejuni (R) | | |
| PF-476 | S. pneumoniae (H) | WADAQYKLCENCSE | 1331 |
| PF-477 | S. pneumoniae (H) | HKNKLNIPHIKS | 1332 |
| PF-478 | S. epidermidis (C) | HLFILKSHLKPFPPFRYTYD | 1333 |
| | E. coli (C) | | |
| | MRSA (H) | | |
| | S. pneumoniae (C) | | |
| PF-479 | S. pneumoniae (C) | AYILKRREEKNK | 1334 |
| PF-480 | S. epidermidis (C) | MVEILVNTAISVYIVALYTQWLSTRDN | 1335 |
| | E. coli (R) | LKA | |
| | MRSA (C) | | |
| | S. pneumoniae (R) | | |
| | E. faecalis (C) | | |
| PF-482 | S. pneumoniae (S) | LVGYVRTSGTVRSYKIN | 1336 |
| PF-484 | E. faecalis (A) | HKKDIRKQVFKN | 1337 |
| PF-485 | S. pneumoniae (A) | KNSMSRSIALID | 1338 |
| PF-511 | S. pneumoniae (H) | VMQSLYVKPPLILVTKLAQQN | 1339 |
| PF-512 | S. pneumoniae (H) | SFMPEIQKNTIPTQMK | 1340 |
| PF-513 | S. pneumoniae (M) | SNGVGLGVGIGSGIRF-NH2 | 1341 |
| PF-514 | S. epidermidis (C) | QRFYKLFYHIDLTNEQALKLFQVK | 1342 |
| | E. coli (R) | | |
| | S. pneumoniae (M) | | |
| | E. faecalis (C) | | |
| PF-515 | S. pneumoniae (H) | DKSTQDKDIKQAKLLAQELGL-NH2 | 1343 |
| PF-516 | S. pneumoniae (H) | ASKQASKQASKQASKQ | 1344 |
| PF-517 | S. pneumoniae (M) | VKPTMTASLISTVC | 1345 |
| PF-518 | S. epidermidis (C) | SFYSKYSRYIDNLAGAIFLFF | 1346 |
| | E. coli (R) | | |
| | MRSA (C) | | |
| | S. pneumoniae (M) | | |
| | E. faecalis (C) | | |
| PF-519 | E. coli (R) | YLVYSGVLATAAAF-NH2 | 1347 |
| | MRSA (C) | | |
| | S. pneumoniae (S) | | |
| | E. faecalis (C) | | |
| PF-520 | S. pneumoniae (M) | LGLTAGVAYAAQPTNQPTNQPTNQPT | 1348 |
| | | NQPTNQPTNQPRW-NH2 | |
| PF-521 | S. pneumoniae (H) | CGKLLEQKNFFLKTR | 1349 |
| PF-522 | S. pneumoniae (H) | FELVDWLETNLGKILKSKSA-NH2 | 1350 |
| PF-524 | E. coli (M) | PDAPRTCYHKPILAALSRIVVTDR | 1351 |
| | MRSA (C) | | |
| | S. pneumoniae (M) | | |
| | E. faecalis (C) | | |
| PF-525 | S. pneumoniae (H) | KFSDQIDKGQDALKDKLGDL | 1352 |
| PF-526 | S. epidermidis (C) | VLLLFIFQPFQKQLL-NH2 | 1353 |
| | E. coli (R) | | |
| | C. albicans (C) | | |
| | MRSA (C) | | |
| | S. pneumoniae (R) | | |
| PF-527 | S. epidermidis (M) | GSVIKKRRKRMAKKKHRKLLKKTRIQ | 1354 |
| | M. luteus (S) | RRRAGK | |
| | B. subtilis (I) | | |
| | P. aeruginosa (I) | | |
| | C. albicans (B) | | |
| | MRSA (I) | | |
| | S. pneumoniae (H) | | |
| | C. jeikeium (I) | | |
| | C. jejuni (M) | | |
| PF-528 | S. epidermidis (H) | LVDVVVLIRRHLPKSCS-NH2 | 1355 |
| | E. coli (H) | | |
| | C. albicans (C) | | |
| | MRSA (H) | | |
| | S. pneumoniae (R) | | |
| PF-529 | S. pneumoniae (H) | LSEMERRRLRKRA-NH2 | 1356 |
| PF-530 | S. epidermidis (H) | SKFKVLRKIIIKEYKGELMLSIQKQR | 1357 |
| | E. coli (R) | | |
| | MRSA (C) | | |
| | S. pneumoniae (R) | | |
| | E. faecalis (C) | | |
| PF-531 | S. epidermidis (I) | YIQFHLNQQPRPKVKKIKIFL-NH2 | 1358 |
| | E. coli (M) | | |
| | P. aeruginosa (I) | | |
| | S. pneumoniae (C) | | |
| PF-532 | E. coli (C) | KFIYKYKLSFIIYKILIQTLTMELNK | 1359 |
| | MRSA (C) | | |
| | S. pneumoniae (C) | | |
| | E. faecalis (C) | | |
| PF-533 | S. epidermidis (H) | KTPNDKIHKTIIIKHIIL | 1360 |
| | E. coli (R) | | |
| | MRSA (H) | | |
| | S. pneumoniae (C) | | |
| | E. faecalis (C) | | |
| PF-534 | S. epidermidis (C) | KYFHLFYHNIIHYSKQHLSLKVDFKN- | 1361 |
| | E. coli (R) | NH2 | |
| | MRSA (C) | | |
| | S. pneumoniae (R) | | |
| | E. faecalis (C) | | |
| PF-535 | P. aeruginosa (H) | NIKTRKRALKIIKQHQRSK | 1362 |
| | S. pneumoniae (H) | | |
| PF-536 | S. epidermidis (C) | MEPIPHIMIIANQIGIIIEKA | 1363 |
| | E. coli (R) | | |
| | P. aeruginosa (H) | | |
| | MRSA (C) | | |
| | S. pneumoniae (M) | | |
| | E. faecalis (C) | | |
| PF-537 | S. pneumoniae (C) | LANDYYKKTKKSW | 1364 |
| PF-538 | S. pneumoniae (H) | KNKKQTDILEKVKEILDKKKKTKSVG | 1365 |
| | | QKLY | |
| PF-539 | MRSA (H) | SIILTKKKRRKIPLSIDSQIYKYTFKQ | 1366 |
| | S. pneumoniae (A) | | |
| PF-540 | S. epidermidis (H) | KSILILIKVIFIGQTTIIL | 1367 |
| | E. coli (R) | | |
| | MRSA (H) | | |
| | S. pneumoniae (R) | | |
| PF-541 | E. coli (H) | RRNLNSPNIKTRKRALKIIKQHQRSK | 1368 |
| | S. pneumoniae (H) | | |
| PF-542 | S. pneumoniae (H) | KKDNPSLNDQDKNAVLNLLALAK | 1369 |
| PF-543 | S. mutans (S) | NILFGIIGFVVAMTAAVIVTAISIAK | 1370 |
| | S. epidermidis (D) | | |
| | M. luteus (C) | | |
| | E. coli (C) | | |
| | MRSA (D) | | |
| | S. pneumoniae (D) | | |
| PF-544 | S. epidermidis (D) | FGEKQMRSWWKVHWFHP | 1371 |
| | MRSA (D) | | |
| | S. pneumoniae (M) | | |
| | E. faecalis (R) | | |
| PF-545 | B. subtilis (I) | RESKLIAMADMIRRRI-NH2 | 1372 |
| | C. albicans (B) | | |
| | E. faecalis (H) | | |
| | C. jeikeium (H) | | |
| PF-546 | S. epidermidis (D) | PIIAPTIKTQIQ | 1373 |
| | E. coli (R) | | |
| | MRSA (D) | | |
| | S. pneumoniae (D) | | |
| | E. faecalis (D) | | |
| | C. jeikeium (D) | | |
| PF-547 | S. epidermidis (R) | WSRVPGHSDTGWKVWHRW-NH2 | 1374 |
| | B. subtilis (I) | | |
| | MRSA (M) | | |
| | E. faecalis (R) | | |
| PF-548 | S. epidermidis (M) | ARPIADLIHFNSTTVTASGDVYYGPG | 1375 |
| | M. luteus (A) | | |
| | B. subtilis (C) | | |
| | MRSA (M) | | |
| | S. pneumoniae (D) | | |
| | C. jeikeium (R) | | |
| | C. jejuni (D) | | |
| PF-549 | B. subtilis (D) | TGIGPIARPIEHGLDS | 1376 |
| | MRSA (C) | | |
| PF-550 | B. subtilis (D) | STENGWQEFESYADVGVDPRRYVPL | 1377 |
| PF-551 | MRSA (C) | QVKEKRREIELQFRDAEKKLEASVQAE | 1378 |
| PF-552 | B. subtilis (D) | ELDKADAALGPAKNLAPLDVINRS | 1379 |
| PF-553 | B. subtilis (D) | LTIVGNALQQKNQKLLLNQKKITSLG | 1380 |
| | MRSA (M) | | |
| | S. pneumoniae (R) | | |
| | C. jeikeium (R) | | |
| PF-554 | B. subtilis (D) | AKNFLTRTAEEIGEQAVREGNINGP | 1381 |
| PF-555 | MRSA (M) | EAYMRFLDREMEGLTAAYNVKLFTEA | 1382 |
| | S. pneumoniae (R) | IS | |
| | C. jejuni (R) | | |
| PF-556 | S. epidermidis (A) | SLQIRMNTLTAAKASIEAA | 1383 |
| | M. luteus (A) | | |
| | B. subtilis (C) | | |
| | MRSA (M) | | |
| | S. pneumoniae (D) | | |
| | E. faecalis (A) | | |
| | C. jeikeium (D) | | |
| | C. jejuni (R) | | |
| PF-557 | B. subtilis (D) | AANKAREQAAAEAKRKAEEQAR | 1384 |
| PF-558 | S. epidermidis (M) | ADAPPPLIVRYS | 1385 |
| | B. subtilis (D) | | |
| | MRSA (C) | | |
| | S. pneumoniae (R) | | |
| | C. jejuni (H) | | |
| PF-559 | B. subtilis (C) | SRPGKPGGVSIDVSRDRQDILSNYP | 1386 |
| | C. jejuni (A) | | |
| PF-560 | B. subtilis (D) | FGNPFRGFTLAMEADFKKRK | 1387 |
| | MRSA (C) | | |
| | S. pneumoniae (R) | | |
| | C. jejuni (A) | | |
| PF-561 | B. subtilis (D) | ESLEADVQAELDTEAAKYPALPASF | 1388 |
| | MRSA (M) | | |
| PF-562 | S. epidermidis (A) | TPEQWLERSTVVVTGLLNRK | 1389 |
| | M. luteus (R) | | |
| | MRSA (M) | | |
| | S. pneumoniae (D) | | |
| | C. jejuni (R) | | |
| PF-563 | B. subtilis (D) | RPELDNELDVVQNSASLDKLQASYN | 1390 |
| | S. pneumoniae (H) | | |
| | C. jejuni (H) | | |
| PF-564 | B. subtilis (D) | TIILNDQINSLQERLNKLNAETDRR | 1391 |
| | MRSA (C) | | |
| | C. jeikeium (R) | | |
| | C. jejuni (R) | | |
| PF-565 | B. subtilis (D) | RAEAEAQRQAEADAKRKAEEAARL | 1392 |
| | MRSA (C) | | |
| PF-566 | M. luteus (D) | EAQQVTQQLGADFNAITTPTATKV | 1393 |
| | B. subtilis (C) | | |
| | MRSA (M) | | |
| | S. pneumoniae (D) | | |
| | C. jeikeium (C) | | |
| | C. jejuni (D) | | |
| PF-567 | M. luteus (C) | QQRVKAVDASLSQVSTQVSGAVASA | 1394 |
| | MRSA (D) | | |
| | S. pneumoniae (D) | | |
| | C. jeikeium (C) | | |
| | C. jejuni (D) | | |
| PF-569 | B. subtilis (D) | KSKISEYTEKEFLEFVEDIYTNNK | 1395 |
| PF-571 | B. subtilis (D) | SDLLYYPNENREDSPAGVVKEVKE | 1396 |
| PF-572 | B. subtilis (D) | WRASKGLPGFKAG | 1397 |
| | S. pneumoniae (R) | | |
| PF-573 | S. pneumoniae (C) | EKKLIVKLIDSIGKSHEEIVGAG | 1398 |
| PF-574 | B. subtilis (D) | LVKSGKLESPYEHSEHLTLSQEKGLE | 1399 |
| PF-575 | P. aeruginosa (A) | LNFRAENKILEKIHISLIDTVEGSA | 1400 |
| | S. pneumoniae (A) | | |
| | C. jeikeium (A) | | |
| | C. jejuni (R) | | |
| PF-576 | S. epidermidis (A) | AYSGELPEPLVRKMSKEQVRSVMGK | 1401 |
| | E. coli (A) | | |
| | MRSA (R) | | |
| | S. pneumoniae (C) | | |
| | C. jejuni (C) | | |
| PF-577 | S. epidermidis (A) | PFETRESFRVPVIGILGGWDYFMHP | 1402 |
| | E. coli (A) | | |
| | P. aeruginosa (A) | | |
| | MRSA (M) | | |
| | S. pneumoniae (R) | | |
| | E. faecalis (A) | | |
| | C. jejuni (R) | | |
| PF-578 | S. mutans (D) | QKANLRIGFTYTSDSNVCNLTFALLGSK | 1403 |
| | S. epidermidis (D) | | |
| | M. luteus (C) | | |
| | P. mirabilis (C) | | |
| | E. coli (C) | | |
| | MRSA (C) | | |
| | S. pneumoniae (D) | | |
| PF-580 | S. epidermidis (M) | EILNNNQVIKELTMKYKTQFESNLGG | 1404 |
| | M. luteus (C) | WTARARR | |
| | MRSA (M) | | |
| | S. pneumoniae (C) | | |
| PF-581 | MRSA (A) | WTARARR | 1405 |
| | S. pneumoniae (A) | | |
| | E. faecalis (A) | | |
| | C. jejuni (A) | | |
| PF-582 | E. faecalis (A) | NLKTIEKECPFCNNKMDIKLKD | 1406 |
| PF-583 | S. mutans (F) | KFQGEFTNIGQSYIVSASHMSTSLNTGK | 1407 |
| | S. epidermidis (I) | | |
| | MRSA (I) | | |
| | S. pneumoniae (D) | | |
| PF-584 | S. epidermidis (C) | SYIKNLSNQKFLIAF | 1408 |
| | E. coli (C) | | |
| | MRSA (D) | | |
| | S. pneumoniae (D) | | |
| | E. faecalis (D) | | |
| | C. jejuni (D) | | |
| PF-585 | S. epidermidis (S) | DYNHLLNVVQDWVNTN | 1409 |
| | MRSA (S) | | |
| | S. pneumoniae (R) | | |
| | E. faecalis (A) | | |
| | C. jejuni (R) | | |
| PF-586 | S. epidermidis (C) | FFNQANYFFKEF | 1410 |
| | E. coli (C) | | |
| | MRSA (D) | | |
| | S. pneumoniae (D) | | |
| | E. faecalis (D) | | |
| | C. jejuni (D) | | |
| PF-587 | S. pneumoniae (C) | ASGKYQSYLLNVYVDSKKDRLDIFDK | 1411 |
| | | LKAKAKFVL | |
| PF-588 | E. faecalis (A) | ESVEAIKAKAIK | 1412 |
| PF-589 | MRSA (M) | APLRIDEIRNSNVIDEVLDCAPKKQEHF | 1413 |
| | S. pneumoniae (C) | FVVPKIIE | |
| PF-590 | C. jejuni (R) | YYQAKLFPLL | 1414 |
| PF-591 | S. pneumoniae (R) | DLLKSLLGQDGAKNDEIIEFIKIIMEK | 1415 |
| | E. faecalis (A) | | |
| | C. jejuni (C) | | |
| PF-592 | S. epidermidis (M) | IMKNYKYFKLFIVKYALF | 1416 |
| | E. coli (C) | | |
| | MRSA (D) | | |
| | S. pneumoniae (D) | | |
| | E. faecalis (D) | | |
| | C. jejuni (S) | | |
| PF-593 | E. faecalis (A) | MEISTLKKEKLHVKDELSQYLANYKK | 1417 |
| PF-594 | E. faecalis (C) | IVSAIV | 1418 |
| PF-595 | S. epidermidis (C) | LQNKIYELLYIKERSKLCS | 1419 |
| | E. coli (C) | | |
| | MRSA (D) | | |
| | S. pneumoniae (R) | | |
| | E. faecalis (D) | | |
| | C. jejuni (D) | | |
| PF-596 | S. epidermidis (D) | SKMWDKILTILILILELIRELIKL | 1420 |
| | E. coli (C) | | |
| | MRSA (D) | | |
| | S. pneumoniae (D) | | |
| | E. faecalis (D) | | |
| | C. jejuni (D) | | |
| PF-597 | E. faecalis (A) | DEIKVSDEEIEKFIKENNL | 1421 |
| PF-598 | S. epidermidis (R) | MKFMLEVRNKAISAYKEITRTQI | 1422 |
| | E. coli (C) | | |
| | MRSA (D) | | |
| | S. pneumoniae (R) | | |
| | E. faecalis (R) | | |
| | C. jejuni (R) | | |
| PF-599 | S. epidermidis (M) | LFEIFKPKH | 1423 |
| | MRSA (C) | | |
| | S. pneumoniae (R) | | |
| | E. faecalis (A) | | |
| | C. jejuni (R) | | |
| PF-600 | S. mutans (S) | TKKIELKRFVDAFVKKSYENYILEREL | 1424 |
| | S. epidermidis (C) | KKLIKAINEELPTK | |
| | M. luteus (C) | | |
| | E. coli (H) | | |
| | MRSA (M) | | |
| | S. pneumoniae (R) | | |
| PF-601 | E. faecalis (A) | YRVTVKALE | 1425 |
| | C. jejuni (A) | | |
| PF-602 | E. faecalis (A) | LEKEKKEYIEKLFKTK | 1426 |
| PF-603 | S. epidermidis (D) | IDKLKKMNLQKLSYEVRISQDGKSIYA | 1427 |
| | M. luteus (A) | RIK | |
| | E. coli (M) | | |
| | MRSA (M) | | |
| | S. pneumoniae (C) | | |
| PF-604 | E. faecalis (A) | LMEQVEV | 1428 |
| PF-605 | S. epidermidis (R) | HYRWNTQWWKY | 1429 |
| | E. coli (C) | | |
| | P. aeruginosa (A) | | |
| | C. albicans (B) | | |
| | MRSA (C) | | |
| | S. pneumoniae (D) | | |
| | E. faecalis (R) | | |
| | C. jejuni (R) | | |
| PF-606 | S. mutans (I) | FESKILNASKELDKEKKVNTALSFNSH | 1430 |
| | S. epidermidis (I) | QDFAKAYQNGKI | |
| | C. albicans (B) | | |
| | MRSA (I) | | |
| | S. pneumoniae (H) | | |
| PF-607 | S. epidermidis (M) | YIESDPRKFDYIFGAIRDH | 1431 |
| | MRSA (S) | | |
| | S. pneumoniae (R) | | |
| | E. faecalis (A) | | |
| | C. jejuni (R) | | |
| PF-609 | MRSA (C) | TEIKLDNNEYLVLNLDDILGILK | 1432 |
| | S. pneumoniae (R) | | |
| | E. faecalis (A) | | |
| | C. jejuni (R) | | |
| PF-610 | S. epidermidis (C) | VFLKLKTSKIDLASIIFYP | 1433 |
| | E. coli (C) | | |
| | MRSA (D) | | |
| | S. pneumoniae (D) | | |
| | E. faecalis (D) | | |
| | C. jejuni (D) | | |
| PF-612 | S. mutans (F) | GTTLKYGLERQLKIDIHPEITIINLNGGA | 1434 |
| | S. epidermidis (C) | DEFAKL | |
| | M. luteus (A) | | |
| | P. mirabilis (C) | | |
| | E. coli (C) | | |
| | MRSA (C) | | |
| | S. pneumoniae (C) | | |
| PF-613 | S. epidermidis (R) | ADEFAKL | 1435 |
| | MRSA (C) | | |
| | E. faecalis (A) | | |
| PF-614 | S. epidermidis (M) | GLDIYA | 1436 |
| | S. pneumoniae (R) | | |
| | E. faecalis (A) | | |
| | C. jejuni (R) | | |
| PF-615 | S. epidermidis (D) | FLNRFIFYIFTVKTKSALIKNLFLD | 1437 |
| | E. coli (C) | | |
| | MRSA (D) | | |
| | S. pneumoniae (D) | | |
| | E. faecalis (D) | | |
| | C. jejuni (D) | | |
| PF-616 | S. epidermidis (R) | IVFVVTKEKK | 1438 |
| | E. faecalis (A) | | |
| PF-617 | C. albicans (H) | PMNAAEPE | 1439 |
| | S. pneumoniae (I) | | |
| | E. faecalis (H) | | |
| PF-618 | S. pneumoniae (I) | KLNTLNKKDNPSLNDQDKNAVLNLLA | 1440 |
| | E. faecalis (H) | LAK | |
| PF-619 | S. epidermidis (M) | WSRVPGHSDTGWKVWHRW | 1441 |
| | E. coli (C) | | |
| | MRSA (M) | | |
| | S. pneumoniae (C) | | |
| PF-621 | S. pneumoniae (I) | PPSSFLV | 1442 |
| | E. faecalis (H) | | |
| PF-622 | S. epidermidis (D) | TREDVFSVRLINNIVNKQA | 1443 |
| | MRSA (D) | | |
| | S. pneumoniae (M) | | |
| | E. faecalis (D) | | |
| | C. jeikeium (D) | | |
| PF-623 | S. epidermidis (M) | VLFAVYLGALDWLFSWLTQKM | 1444 |
| | MRSA (D) | | |
| | S. pneumoniae (D) | | |
| | E. faecalis (D) | | |
| | C. jeikeium (R) | | |
| PF-624 | S. mutans (D) | VFLLDSYCFVKINL | 1445 |
| | S. epidermidis (D) | | |
| | M. luteus (C) | | |
| | P. mirabilis (C) | | |
| | E. coli (C) | | |
| | MRSA (C) | | |
| | S. pneumoniae (D) | | |
| PF-625 | S. pneumoniae (H) | SDSTNNARTRKKARDVTTKDIDK | 1446 |
| PF-626 | S. pneumoniae (H) | KYDFDDFEPEEA | 1447 |
| PF-627 | S. epidermidis (H) | INDLLSYFTLHEK | 1448 |
| | C. albicans (B) | | |
| | MRSA (R) | | |
| | S. pneumoniae (I) | | |
| | E. faecalis (H) | | |
| PF-629 | S. epidermidis (C) | GLAAIATVFALY | 1449 |
| | MRSA (D) | | |
| | S. pneumoniae (M) | | |
| | E. faecalis (R) | | |
| | C. jeikeium (R) | | |
| PF-630 | MRSA (M) | IPATPIIHS | 1450 |
| PF-631 | S. pneumoniae (I) | LIIYFSKTGNTARATRQI | 1451 |
| | E. faecalis (H) | | |
| PF-632 | S. epidermidis (D) | TTIQGVASLEKHGFRYTIIYPTRI | 1452 |
| | B. subtilis (H) | | |
| | C. albicans (B) | | |
| | MRSA (D) | | |
| | S. pneumoniae (M) | | |
| | E. faecalis (D) | | |
| | C. jeikeium (D) | | |
| PF-634 | S. mutans (D) | MPKARPVNHNKKKSKITIKSNFTLFYM | 1453 |
| | S. epidermidis (D) | FNP | |
| | M. luteus (C) | | |
| | P. mirabilis (C) | | |
| | E. coli (C) | | |
| | MRSA (D) | | |
| | S. pneumoniae (D) | | |
| PF-635 | S. epidermidis (M) | MNAHGHSLIFQKMIVHAFAFFSKQKN | 1454 |
| | C. albicans (B) | YLYF | |
| | MRSA (D) | | |
| | S. pneumoniae (D) | | |
| | E. faecalis (D) | | |
| | C. jeikeium (D) | | |
| PF-636 | B. subtilis (H) | LVRLA | 1455 |
| | C. albicans (B) | | |
| | S. pneumoniae (H) | | |
| | E. faecalis (H) | | |
| PF-637 | S. epidermidis (M) | SRIKQDARSVRKYDRIGIFFYSFKSA | 1456 |
| | MRSA (M) | | |
| | S. pneumoniae (M) | | |
| | E. faecalis (D) | | |
| | C. jeikeium (D) | | |
| PF-638 | S. epidermidis (R) | TFILPK | 1457 |
| | MRSA (M) | | |
| | S. pneumoniae (I) | | |
| | E. faecalis (H) | | |
| PF-639 | C. albicans (B) | QATQIKSWIDRLLVSED | 1458 |
| | MRSA (R) | | |
| | S. pneumoniae (I) | | |
| | E. faecalis (H) | | |
| PF-640 | C. albicans (B) | MGDINRNF | 1459 |
| | S. pneumoniae (I) | | |
| | E. faecalis (H) | | |
| PF-642 | MRSA (M) | FTTPMIGIPAGLLGGSYYLKRREEKGK | 1460 |
| PF-643 | MRSA (C) | VRCRL | 1461 |
| | S. pneumoniae (R) | | |
| | E. faecalis (R) | | |
| PF-644 | S. pneumoniae (H) | TSGLIIGENGLNGL | 1462 |
| PF-645 | C. albicans (B) | SNSVQQG | 1463 |
| | S. pneumoniae (I) | | |
| PF-646 | C. albicans (B) | APASPGRRPG | 1464 |
| | S. pneumoniae (H) | | |
| PF-647 | C. albicans (B) | GTFLGQKCAAATAS | 1465 |
| | S. pneumoniae (R) | | |
| PF-649 | E. faecalis (R) | CPRYPFVDVGPAGPWRARWRVGS | 1466 |
| PF-651 | S. pneumoniae (H) | PRWPTGAGRHR | 1467 |
| PF-652 | S. pneumoniae (A) | FLAPARPDLQAQRQALAQ | 1468 |
| PF-653 | S. pneumoniae (H) | QSVHPLPAETPVADVI | 1469 |
| PF-654 | C. albicans (B) | LSGRLAGRR | 1470 |
| | MRSA (R) | | |
| | S. pneumoniae (A) | | |
| PF-655 | S. epidermidis (R) | DAPCFDDQFGDLKCQMC | 1471 |
| | B. subtilis (H) | | |
| | MRSA (M) | | |
| | S. pneumoniae (H) | | |
| PF-656 | MRSA (R) | RGMFVPFHDVDCVQ | 1472 |
| PF-657 | S. epidermidis (C) | YVANYTITQFGRDFDDRLAVAIHFA | 1473 |
| | MRSA (D) | | |
| | S. pneumoniae (H) | | |
| | E. faecalis (D) | | |
| | C. jeikeium (D) | | |
| PF-658 | MRSA (R) | PTTPPPTTPPEIPTGGTVIST | 1474 |
| | S. pneumoniae (H) | | |
| PF-659 | S. epidermidis (M) | TVIST | 1475 |
| | B. subtilis (H) | | |
| | MRSA (R) | | |
| | S. pneumoniae (C) | | |
| PF-660 | S. pneumoniae (H) | TDPQATAAPRRRTSPR | 1476 |
| PF-661 | MRSA (R) | PDEDIRRRAILPPAGPCRPMSPE | 1477 |
| PF-662 | S. pneumoniae (A) | GKQSRAHGPVASRREFRRKSG | 1478 |
| PF-663 | S. pneumoniae (A) | ATLIPRKA | 1479 |
| PF-664 | S. epidermidis (M) | DQLCVEYPARVSTG | 1480 |
| | MRSA (R) | | |
| | S. pneumoniae (M) | | |
| | E. faecalis (R) | | |
| PF-665 | S. pneumoniae (H) | VLRVATAVGEVPTGL | 1481 |
| PF-666 | S. pneumoniae (A) | PNRRSRPR | 1482 |
| PF-667 | S. epidermidis (R) | PAHQRLRIDQRLVADRDMVQDYES | 1483 |
| | MRSA (R) | | |
| | S. pneumoniae (R) | | |
| | E. faecalis (R) | | |
| PF-668 | S. epidermidis (M) | TNAESMALAFRGRVHMSVNIAGLT | 1484 |
| | B. subtilis (A) | | |
| | C. albicans (A) | | |
| | MRSA (R) | | |
| | S. pneumoniae (M) | | |
| | E. faecalis (D) | | |
| | C. jeikeium (D) | | |
| PF-670 | B. subtilis (H) | TVIVAPMHSGV | 1485 |
| | S. pneumoniae (H) | | |
| PF-672 | S. epidermidis (I) | MRFGSLALVAYDSAIKHSWPRPSSVRR | 1486 |
| | B. subtilis (I) | LRM | |
| | C. albicans (I) | | |
| | MRSA (I) | | |
| | S. pneumoniae (I) | | |
| | E. faecalis (I) | | |
| | C. jeikeium (R) | | |
| PF-675 | S. pneumoniae (C) | EIIPISPTRRCEMHTMSSAEYRGL | 1487 |
| | E. faecalis (R) | | |
| PF-677 | S. epidermidis (R) | TCRGAGMH | 1488 |
| | MRSA (D) | | |
| | S. pneumoniae (D) | | |
| | E. faecalis (R) | | |
| PF-680 | MRSA (R) | ADPHPTTGI | 1489 |
| PF-681 | S. epidermidis (M) | TALTTVGVSGARLITYCVGVEDI | 1490 |
| | MRSA (M) | | |
| | S. pneumoniae (M) | | |
| | E. faecalis (R) | | |
| | C. jeikeium (R) | | |
| PF-682 | S. pneumoniae (A) | RRGKSEQGLSRR | 1491 |
| PF-683 | S. epidermidis (R) | LWPVA | 1492 |
| | MRSA (R) | | |
| | S. pneumoniae (H) | | |
| PF-684 | C. albicans (B) | RKLSLASGFALWRRSLV | 1493 |
| | S. pneumoniae (C) | | |
| | E. faecalis (A) | | |
| PF-685 | S. epidermidis (M) | PTLWLACL | 1494 |
| | MRSA (M) | | |
| | S. pneumoniae (M) | | |
| | E. faecalis (R) | | |
| | C. jeikeium (R) | | |
| PF-686 | S. epidermidis (H) | LAVLMGYIGYRGWSGKRHINRQ | 1495 |
| | B. subtilis (I) | | |
| | C. albicans (B) | | |
| | MRSA (M) | | |
| | S. pneumoniae (A) | | |
| | E. faecalis (R) | | |
| PF-687 | S. pneumoniae (A) | AKRVLSLAVAPHRRQPVQGT | 1496 |
| PF-688 | S. pneumoniae (A) | ARNHAVIPAG | 1497 |
| PF-690 | S. epidermidis (R) | MIPLAGDPVSSHRTVEFGVLGTYLVSG | 1498 |
| | MRSA (R) | GSL | |
| | S. pneumoniae (M) | | |
| | E. faecalis (R) | | |
| PF-691 | S. pneumoniae (R) | HRTVEFGVLGTYLVSGGSL | 1499 |
| PF-692 | MRSA (R) | GVAREDPLEPDPLAPIIDDSR | 1500 |
| PF-693 | S. pneumoniae (A) | PDPAR | 1501 |
| PF-694 | MRSA (R) | DLIRPLYSMSAPSVA | 1502 |
| | S. pneumoniae (A) | | |
| PF-695 | MRSA (R) | ALSVMLGNIPLVVPNANQL | 1503 |
| | S. pneumoniae (C) | | |
| | E. faecalis (R) | | |
| PF-696 | S. pneumoniae (H) | IRSGISAAYARPLR | 1504 |
| PF-697 | C. albicans (H) | RADARAK | 1505 |
| | S. pneumoniae (H) | | |
| PF-698 | C. albicans (H) | SSGRAGVKCRRPTGR | 1506 |
| | S. pneumoniae (A) | | |
| | E. faecalis (A) | | |
| PF-699 | S. pneumoniae (A) | GRAGVKCRRPTGR | 1507 |
| PF-700 | S. pneumoniae (C) | LNWPFTGR | 1508 |
| PF-702 | S. pneumoniae (H) | LSGRLAGRR | 1509 |
| PF-704 | S. pneumoniae (C) | APAARAAL | 1510 |
| PF-737 | S. pneumoniae (D) | KSSGSSASASSTAGGSSSK | 1511 |
| PF-738 | MRSA (M) | KSGATSAASGAKSGASS | 1512 |
| PF-741 | S. mutans (D) | AKREDTVAAQIGANILNLIQ | 1513 |
| | S. epidermidis (C) | | |
| | M. luteus (C) | | |
| | P. mirabilis (C) | | |
| | E. coli (C) | | |
| | MRSA (C) | | |
| | S. pneumoniae (D) | | |
| PF-744 | S. pneumoniae (H) | LGVGTFVGKVLIKNQQKQKSKKKAQ | 1514 |
| PF-745 | S. mutans (D) | ANSQNSLFSNRSSFKSIFDKKSNITTNA | 1515 |
| | M. luteus (C) | TTPNSNIIIN | |
| | MRSA (C) | | |
| | S. pneumoniae (C) | | |
| PF-746 | S. mutans (D) | FLGNSQYFTRK | 1516 |
| | S. epidermidis (C) | | |
| | M. luteus (C) | | |
| | E. coli (C) | | |
| | P. aeruginosa (A) | | |
| | MRSA (C) | | |
| | S. pneumoniae (C) | | |
| PF-748 | S. pneumoniae (H) | FQGFFDVAVNKWWEEHNKAKLWKN | 1517 |
| | | VKGKFLEGEGEEEDDE | |
| PF-749 | S. pneumoniae (H) | GVNKWWEEHNKAKLWKNVKGKFLE | 1518 |
| | | GEGEEEDDE | |
| PF-752 | S. pneumoniae (C) | LHVIRPRPELSELKFPITKILKVNKQGL | 1519 |
| | | KK | |
| PF-756 | S. pneumoniae (A) | DALLRLA | 1520 |
| PF-757 | S. pneumoniae (H) | PQAISSVQQNA | 1521 |
| PF-760 | S. epidermidis (M) | DHITLDDYEIHDGFNFELYYG | 1522 |
| | MRSA (M) | | |
| | S. pneumoniae (C) | | |
| PF-761 | S. mutans (D) | SKFELVNYASGCSCGADCKCASETECK | 1523 |
| | S. epidermidis (C) | CASKK | |
| | M. luteus (C) | | |
| | E. coli (C) | | |
| | P. aeruginosa (C) | | |
| | MRSA (D) | | |
| | S. pneumoniae (C) | | |
| PF-762 | S. pneumoniae (H) | PAPAPSAPAPAPEQPEQPA | 1524 |
| PF-763 | S. epidermidis (M) | GIWMARNYFHRSSIRKVYVESDKEYE | 1525 |
| | M. luteus (C) | RVHPMQKIQYEGNYKSQ | |
| | MRSA (D) | | |
| | S. pneumoniae (C) | | |
| PF-764 | MRSA (D) | GYFEPGKRD | 1526 |
| | S. pneumoniae (H) | | |
| PF-770 | S. mutans (D) | GVGIGFIMMGVVGYAVKLVHIPIRYLIV | 1527 |
| | S. epidermidis (D) | | |
| | M. luteus (C) | | |
| | P. mirabilis (C) | | |
| | E. coli (C) | | |
| | MRSA (D) | | |
| | S. pneumoniae (C) | | |
| PF-776 | S. mutans (D) | VSILLYLSATIILPNVLRLLVARAIIVRV | 1528 |
| | S. epidermidis (D) | | |
| | M. luteus (C) | | |
| | E. coli (C) | | |
| | MRSA (D) | | |
| | S. pneumoniae (C) | | |
| PF-C052 | P. gingivalis (H) | SRFRNGV | 1529 |
| PF-C055 | F. nucleatum (T) | YNLSIYIYFLHTITIAGLITLPFII | 1530 |
| | S. mutans (I) | | |
| PF-C057 | S. mutans (I) | YFWWYWVQDCIPYKNNEVWLELSNN | 1531 |
| | | MK | |
| PF-C058 | S. mutans (F) | FETGFGDGYYMSLWGLNEKDEVCKV | 1532 |
| | | VIPFINPELID | |
| PF-C061 | F. nucleatum (T) | TLNYKKMFFSVIFLLGLNYLICNSPLFF | 1533 |
| | S. mutans (F) | KQIEF | |
| PF-C062 | F. nucleatum (T) | PLARATEVVATLFIICSLLLYLTR | 1534 |
| | S. mutans (I) | | |
| PF-C064 | F. nucleatum (T) | DEEALEMGANLYAQFAIDFLNSKK | 1535 |
| PF-C065 | F. nucleatum (T) | DEERYSDSYFLKEKVFYLILALFLILFH | 1536 |
| | | QKYLYFLEIITI | |
| PF-C069 | F. nucleatum (T) | NALMLREMQLAKNIKVEVTDVLSNKK | 1537 |
| | | YC | |
| PF-C071 | F. nucleatum (T) | QVIVKIL | 1538 |
| PF-C072 | F. nucleatum (T) | KKMFSLIRKVNWIFFILFIVLDLTNVFP | 1539 |
| | P. gingivalis (T) | LIRTILFAILSRQ | |
| | S. mutans (F) | | |
| PF-C075 | F. nucleatum (T) | KALVISVFAIVFSIIFVKFFYWRDKK | 1540 |
| | P. gingivalis (R) | | |
| | S. mutans (F) | | |
| PF-C084 | F. nucleatum (T) | FFSVIFLFGLNYLICNSPLFNILR | 1541 |
| | P. gingivalis (R) | | |
| | S. mutans (F) | | |
| PF-C085 | S. mutans (F) | KKFKIFVIINWFYHKYIILNFEENF | 1542 |
| PF-C086 | F. nucleatum (T) | ELFFTILSDCNELFLLHLLQQPLFYIKK | 1543 |
| | | GK | |
| PF-C088 | F. nucleatum (H) | DIANNILNSVSERLIIA | 1544 |
| | P. gingivalis (R) | | |
| | S. mutans (I) | | |
| PF-C089 | P. gingivalis (R) | MPKRHYYKLEAKALQFGLPFAYSPIQL | 1545 |
| | | LK | |
| PF-C091 | F. nucleatum (T) | ASNTPRFVRLTLFNFYSKIWNVTHLFLF | 1546 |
| | | NNL | |
| PF-C095 | F. nucleatum (T) | LLALNMNEDTYYFELFFIFDNQNKKW | 1547 |
| | | LIFDLKERG | |
| PF-C098 | F. nucleatum (T) | PETKGKVSAFVFGIVVANVIAVVYILY | 1548 |
| | S. mutans (F) | MLREIGIIQ | |
| PF-C120 | F. nucleatum (T) | ASLSTMTFKVMELKELIILLCGLTMLMI | 1549 |
| | | QTEFV | |
| PF-C131 | F. nucleatum (T) | QWIVAKREIRMHIYCHISVIHVIIFFG | 1550 |
| | S. mutans (F) | | |
| PF-C135 | F. nucleatum (C) | KNTHAYLRVLRLSSLILSYQASVYPLF | 1551 |
| | S. mutans (F) | AYLCQQKDY | |
| PF-C136 | F. nucleatum (C) | LILSYQASVYPLFAYLCQQKDY | 1552 |
| | P. gingivalis (R) | | |
| PF-C137 | F. nucleatum (T) | QRMYWFKRGFETGDFSAGDTFAELK | 1553 |
| PF-C139 | S. mutans (F) | LLASHPERLSLGVFFVYRVLHLLLENT | 1554 |
| PF-C142 | S. mutans (I) | DFPPLSFFRRRFHAYTAPIDNFFGANPF | 1555 |
| PF-C143 | F. nucleatum (C) | VVFGGGDRLV | 1556 |
| PF-C145 | F. nucleatum (C) | YGKESDP | 1557 |
| | S. mutans (I) | | |
| PF-C180 | P. gingivalis (R) | TVEELDKAFTWGAAAALAIGVIAINVG | 1558 |
| | S. mutans (S) | LAAGYCYNNNDVF | |
| PF-C181 | F. nucleatum (T) | KMRAGQVVFIYKLILVLLFYVLQKLFD | 1559 |
| | | LKKGCF | |
| PF-C194 | F. nucleatum (T) | NTNDLLQAFELMGLGMAGVFIVLGILY | 1560 |
| | P. gingivalis (T) | IVAELLIKIFPVNN | |
| | S. mutans (F) | | |
| PF-C214 | F. nucleatum (T) | GGHKQLVIEPLVSQ | 1561 |
| PF-C281 | S. mutans (F) | KKEKLLTAIRLQHRAEIRGYFTIFFLFFRI | 1562 |
| PF-C290 | S. mutans (F) | GNVHPESDFHNLIQFIKTFLYFTIFFKYFL | 1563 |
| PF-C291 | F. nucleatum (T) | HPFLTGTGCPLFLIFRLFFVKAYFSFTVF | 1564 |
| | S. mutans (F) | | |
| PF-C293 | F. nucleatum (T) | IIIILPKIYLVCKTV | 1565 |
| | P. gingivalis (R) | | |
| | S. mutans (F) | | |
| PF-S003 | S. epidermidis (R) | ALALLKQDLLNFEGRGRIITSTYLQFNE | 1566 |
| | M. luteus (R) | GCVP | |
| | B. subtilis (A) | | |
| | P. aeruginosa (A) | | |
| | C. albicans (A) | | |
| | MRSA (M) | | |
| | S. pneumoniae (D) | | |
| | C. jeikeium (D) | | |
| | C. jejuni (D) | | |

Key to Abbreviations:
(A) Peptide aggregates;
(B) Less hyphal formation;
(C) Clumps;
(D) Diffuse clumps and small polyps;
(F) Diffuse growth;
(H) Thin;
(I) Growth inhibition;
(M) Microcolony formation;
(R) Rippled;
(S) Small polyps;
(T) Thick;
(W) Halo formation on top, microlonies on bottom.
These data thus indicate peptide-mediated interruption of bacterial biofilm formation processes, cellular metabolism, cellular import/export, nutrient acquisition, quorum sensing and communication, motility, chemotaxis, replication, translation, and/or transcription. Accordingly, without being bound to a particular theory, it is believed that the alteration of one or more of these basic pathways is important to pathogenesis, or the stopping thereof.

[0118] In certain embodiments, the amino acid sequence of the antimicrobial peptides comprises or consists of a single amino acid sequence, e.g., as listed above in Tables 4 and/or 5, and/or Table 15, and/or below in Table 14. In certain embodiments the amino acid sequence of the antimicrobial peptides comprises two copies, three copies, four copies, five copies six copies or more of one or more of the amino acid sequences listed in Tables 4, and/or 5, and/or Table 15, and/or Table 14. Thus, compound antimicrobial constructs are contemplated where the construct comprises multiple domains each having antimicrobial activity. The AMP domains comprising such a construct can be the same or different. In certain embodiments the construct comprises at least 2, at least 3, at least 4, at least 5, at least 6, at least 7, or at least 8 different AMP domains each domain comprising a different AMP sequence.

[0119] Various AMP domains comprising such a construct can be joined directly to each other or two or more of such domains can be attached to each other via a linker. An illustrative, but non-limiting, list of suitable linkers is provided in Table 16. Thus, in certain embodiments, two or more AMP domains comprising a compound AMP construct are chemically conjugated together.

[0120] In certain embodiments the two or more AMP domains comprising the AMP construct are joined by a peptide linker. Where all the AMP domains are attached directly to each other or are joined by peptide linkers, the entire construct can be provided as a single-chain peptide (fusion protein).

[0121] In various embodiments, the antimicrobial peptides described herein comprise one or more of the amino acid sequences shown in Tables 4, and/or 5, and/or 15 and/or 14 (and/or the retro, inverso, retroinverso, etc. forms of such sequences). In certain embodiments the peptides range in length up to about 100 amino acids in length, preferably up to about 80, about 70, about 60, or about 51 amino acids in length. In certain embodiments the peptides range in length from about 8 amino acids up to about 100 amino acids 80 amino acids, 60 amino acids or about 51 amino acids in length. In certain embodiments the peptides range in length from about 8 up to about 50, 40, 30, 20, 15, 15, 13, or 12 amino acids in length.

[0122] As shown in Tables 4, and/or 5, and/or 15 and/or 14, the various amino acid sequences described herein are effective against particular microorganisms. The range of activity of the peptides or compositions comprising such peptides can be increased by including amino acid sequences effective against different microorganisms either as separate components and/or as multiple domains within a single construct.

TABLE 6
Illustrative target microorganisms and peptides effective against that target.
Gram Positive Bacteria:

| | |
|---|---|
| A. naeslundii | PF-531, PF-527, PF-672, PF-545, PF-168, PF-448, PF-525, PF-529, PF- |
| | 148 |
| B. subtilis | PF-002, PF-005, PF-006, PF-040, PF-053, PF-056, PF-061, PF-063, PF- |
| | 067, PF-068, PF-069, PF-070, PF-071, PF-145, PF-148, PF-171, PF-175, |
| | PF-283, PF-289, PF-292, PF-296, PF-297, PF-301, PF-303, PF-305, PF- |
| | 306, PF-307, PF-318, PF-319, PF-322, PF-335, PF-339, PF-342, PF-497, |
| | PF-499, PF-527, PF-531, PF-545, PF-547, PF-548, PF-549, PF-550, PF- |
| | 552, PF-553, PF-554, PF-556, PF-557, PF-558, PF-559, PF-560, PF-561, |
| | PF-563, PF-564, PF-565, PF-566, PF-569, PF-571, PF-572, PF-574, PF- |
| | 632, PF-636, PF-655, PF-659, PF-668, PF-670, PF-672, PF-686, PF-998, |
| | PF-2003 |
| C. difficile | PF-522, PF-531, PF-538 |
| C. jeikeium | PF-001, PF-003, PF-004, PF-101, PF-011, PF-012, PF-013, PF-021, PF- |
| | 022, PF-025, PF-028, PF-030, PF-032, PF-033, PF-036, PF-037, PF-040, |
| | PF-042, PF-043, PF-046, PF-048, PF-052, PF-053, PF-056, PF-057, PF- |
| | 063, PF-065, PF-067, PF-068, PF-073, PF-075, PF-076, PF-099, PF-124, |
| | PF-127, PF-129, PF-133, PF-135, PF-137, PF-139, PF-140, PF-145, PF- |
| | 148, PF-164, PF-173, PF-176, PF-186, PF-188, PF-190, PF-191, PF-196, |
| | PF-199, PF-203, PF-204, PF-208, PF-527, PF-531, PF-545, PF-546, PF- |
| | 548, PF-553, PF-556, PF-564, PF-566, PF-567, PF-575, PF-622, PF-523, |
| | PF-629, PF-632, PF-635, PF-637, PF-657, PF-668, PF-672, PF-681, PF- |
| | 685, PF-S003 |
| E. faecalis | PF-007, PF-053, PF-057, PF-068, PF-347, PF-349, PF-355, PF-356, PF- |
| | 363, PF-366, PF-369, PF-374, PF-375, PF-376, PF-379, PF-380, PF-381, |
| | PF-386, PF-387, PF-389, PF-390, PF-392, PF-393, PF-394, PF-396, PF- |
| | 398, PF-399, PF-401, PF-407, PF-410, PF-411, PF-418, PF-422, PF-425, |
| | PF-426, PF-427, PF-429, PF-431, PF-432, PF-439, PF-440, PF-444, PF- |
| | 447, PF-450, PF-451, PF-452, PF-454, PF-456, PF-460, PF-461, PF-469, |
| | PF-470, PF-471, PF-472, PF-473, PF-474, PF-475, PF-480, PF-484, PF- |
| | 514, PF-518, PF-519, PF-524, PF-530, PF-532, PF-533, PF-534, PF-536, |
| | PF-544, PF-545, PF-546, PF-547, PF-556, PF-577, PF-581, PF-582, PF- |
| | 584, PF-585, PF-586, PF-588, PF-591, PF-592, PF-593, PF-594, PF-595, |
| | PF-596, PF-597, PF-598, PF-599, PF-601, PF-602, PF-604, PF-605, PF- |
| | 607, PF-609, PF-610, PF-613, PF-614, PF-615, PF-616, PF-617, PF-618, |
| | PF-621, PF-622, PF-623, PF-627, PF-629, PF-631, PF-632, PF-635, PF- |
| | 636, PF-637, PF-638, PF-639, PF-640, PF-643, PF-649, PF-657, PF-664, |
| | PF-667, PF-668, PF-672, PF-675, PF-677, PF-681, PF-684, PF-685, PF- |
| | 686, PF-690, PF-695, PF-698 |
| M. luteus | PF-001, PF-003, PF-004, PF-006, PF-007, PF-010, PF-012, PF-013, PF- |
| | 020, PF-021, PF-022, PF-025, PF-030, PF-036, PF-037, PF-040, PF-042, |
| | PF-043, PF-051, PF-052, PF-053, PF-056, PF-057, PF-063, PF-067, PF- |
| | 068, PF-071, PF-073, PF-075, PF-076, PF-125, PF-127, PF-137, PF-139, |
| | PF-140, PF-145, PF-148, PF-171, PF-175, PF-176, PF-199, PF-204, PF- |
| | 212, PF-215, PF-224, PF-226, PF-234, PF-235, PF-249, PF-250, PF-255, |
| | PF-257, PF-264, PF-270, PF-271, PF-274, PF-276, PF-278, PF-357, PF- |
| | 527, PF-543, PF-548, PF-556, PF-562, PF-566, PF-567, PF-578, PF-580, |
| | PF-600, PF-603, PF-612, PF-624, PF-634, PF-741, PF-745, PF-746, PF- |
| | 761, PF-763, PF-770, PF-776, PF-S003 |
| MRSA | PF-001, PF-003, PF-004, PF-006, PF-007, PF-010, PF-011, PF-012, PF- |
| | 013, PF-015, PF-017, PF-019, PF-020, PF-021, PF-022, PF-023, PF-024, |
| | PF-025, PF-026, PF-027, PF-028, PF-029, PF-030, PF-031, PF-033, PF- |
| | 035, PF-036, PF-037, PF-040, PF-041, PF-042, PF-043, PF-045, PF-046, |
| | PF-048, PF-049, PF-051, PF-052, PF-053, PF-056, PF-057, PF-058, PF- |
| | 063, PF-064, PF-065, PF-066, PF-067, PF-068, PF-071, PF-073, PF-074, |
| | PF-075, PF-076, PF-140, PF-145, PF-148, PF-149, PF-156, PF-168, PF- |
| | 171, PF-178, PF-191, PF-209, PF-347, PF-349, PF-350, PF-354, PF-355, |
| | PF-356, PF-357, PF-360, PF-362, PF-366, PF-369, PF-370, PF-373, PF- |
| | 374, PF-375, PF-376, PF-378, PF-379, PF-380, PF-381, PF-382, PF-386, |
| | PF-387, PF-389, PF-390, PF-392, PF-393, PF-394, PF-395, PF-396, PF- |
| | 398, PF-399, PF-401, PF-403, PF-404, PF-405, PF-406, PF-407, PF-408, |
| | PF-410, PF-411, PF-413, PF-417, PF-418, PF-422, PF-425, PF-426, PF- |
| | 427, PF-429, PF-430, PF-431, PF-432, PF-439, PF-440, PF-442, PF-443, |
| | PF-444, PF-447, PF-450, PF-451, PF-452, PF-453, PF-454, PF-458, PF- |
| | 460, PF-461, PF-469, PF-471, PF-472, PF-473, PF-474, PF-475, PF-478, |
| | PF-480, PF-518, PF-519, PF-524, PF-526, PF-527, PF-528, PF-530, PF- |
| | 532, PF-533, PF-534, PF-536, PF-539, PF-540, PF-543, PF-544, PF-545, |
| | PF-546, PF-547, PF-548, PF-549, PF-551, PF-553, PF-555, PF-556, PF- |
| | 558, PF-560, PF-561, PF-562, PF-564, PF-565, PF-566, PF-567, PF-576, |
| | PF-577, PF-578, PF-580, PF-581, PF-583, PF-584, PF-585, PF-586, PF- |
| | 589, PF-592, PF-595, PF-596, PF-598, PF-599, PF-600, PF-603, PF-605, |
| | PF-606, PF-607, PF-609, PF-610, PF-612, PF-613, PF-615, PF-619, PF- |
| | 622, PF-623, PF-624, PF-627, PF-629, PF-630, PF-632, PF-634, PF-635, |
| | PF-637, PF-638, PF-639, PF-652, PF-643, PF-654, PF-655, PF-656, PF- |
| | 657, PF-658, PF-659, PF-661, PF-664, PF-667, PF-778, PF-672, PF-677, |
| | PF-680, PF-683, PF-685, PF-686, PF-690, PF-692, PF-694, PF-695, PF- |
| | 738, PF-741, PF-745, PF-746, PF-760, PF-761, PF-763, PF-764, PF-770, |
| | PF-776, PF-S003 |
| S. epidermidis | PF-001, PF-003, PF-004, PF-006, PF-007, PF-009, PF-010, PF-012, PF- |
| | 013, PF-020, PF-021, PF-022, PF-024, PF-025, PF-027, PF-028, PF-030, |
| | PF-032, PF-033, PF-034, PF-036, PF-037, PF-040, PF-041, PF-042, PF- |
| | 043, PF-046, PF-048, PF-051, PF-052, PF-953, PF-956, PF-957, PF-961, |
| | PF-963, PF-964, PF-965, PF-967, PF-968, PF-971, PF-073, PF-074, PF- |
| | 075, PF-076, PF-099, PF-123, PF-124, PF-125, PF-127, PF-128, PF-129, |
| | PF-137, PF-139, PF-140, PF-145, PF-148, PF-153, PF-157, PF-171, PF- |
| | 173, PF-176, PF-178, PF-180, PF-186, PF-190, PF-191, PF-192, PF-196, |
| | PF-199, PF-203, PF-204, PF-208, PF-209, PF-226, PF-233, PF-273, PF- |
| | 278, PF-283, PF-290, PF-292, PF-293, PF-294, PF-296, PF-297, PF-301, |
| | PF-307, PF-310, PF-313, PF-318, PF-319, PF-322, PF-335, PF-339, PF- |
| | 342, PF-347, PF-349, PF-350, PF-355, PF-356, PF-357, PF-360, PF-363, |
| | PF-366, PF-369, PF-370, PF-373, PF-374, PF-375, PF-376, PF-378, PF- |
| | 379, PF-380, PF-381, PF-383, PF-386, PF-387, PF-389, PF-390, PF-393, |
| | PF-395, PF-396, PF-397, PF-398, PF-399, PF-401, PF-403, PF-404, PF- |
| | 406, PF-407, PF-408, PF-410, PF-411, PF-413, PF-417, PF-418, PF-422, |
| | PF-425, PF-246, PF-249, PF-430, PF-431, PF-432, PF-439, PF-440, PF- |
| | 444, PF-447, PF-451, PF-452, PF-453, PF-454, PF-460, PF-469, PF-471, |
| | PF-473, PF-474, PF-475, PF-478, PF-480, PF-514, PF-518, PF-526, PF- |
| | 527, PF-528, PF-530, PF-531, PF-533, PF-534, PF-536, PF-540, PF-543, |
| | PF-544, PF-546, PF-547, PF-548, PF-556, PF-558, PF-562, PF-576, PF- |
| | 577, PF-578, PF-580, PF-583, PF-584, PF-585, PF-586, PF-592, PF-595, |
| | PF-596, PF-598, PF-599, PF-600, PF-603, PF-605, PF-606, PF-607, PF- |
| | 610, PF-612, PF-613, PF-614, PF-615, PF-616, PF-619, PF-622, PF-623, |
| | PF-624, PF-627, PF-632, PF-634, PF-635, PF-637, PF-638, PF-655, PF- |
| | 657, PF-659, PF-664, PF-667, PF-778, PF-672, PF-677, PF-681, PF-683, |
| | PF-685, PF-686, PF-690, PF-741, PF-746, PF-760, PF-761, PF-763, PF- |
| | 770, PF-776, PF-S003 |
| S. mutans | G-1, G-2, G-4, G-8, PF-020, PF-040, PF-051, PF-531, PF-543, PF-547, |
| | PF-578, PF-583, PF-600, PF-606, PF-612, PF-624, PF-634, PF-741, PF- |
| | 745, PF-746, PF-761, PF-770, PF-776, PF-C055, PF-C057, PF-C058, PF- |
| | C061, PF-C062, PF-C072, PF-C075, PF-C084, PF-C085, PF-C088, PF- |
| | C098, PF-C131, PF-C135, PF-C139, PF-C142, PF-C146, PF-C180, PF- |
| | C194, PF-C281, PF-C290, PF-C291, PF-C293 |
| S. pneumoniae | PF-002, PF-005, PF-006, PF-020, PF-033, PF-040, PF-051, PF-053, PF- |
| | 056, PF-057, PF-061, PF-063, PF-068, PF-071, PF-073, PF-140, PF-144, |
| | PF-145, PF-148, PF-171, PF-175, PF-178, PF-220, PF-355, PF-356, PF- |
| | 357, PF-363, PF-366, PF-380, PF-389, PF-390, PF-393, PF-407, PF-411, |
| | PF-414, PF-415, PF-416, PF-417, PF-418, PF-419, PF-421, PF-422, PF- |
| | 423, PF-424, PF-425, PF-426, PF-427, PF-428, PF-429, PF-430, PF-431, |
| | PF-432, PF-433, PF-434, PF-437, PF-439, PF-440, PF-442, PF-443, PF- |
| | 444, PF-445, PF-446, PF-447, PF-448, PF-449, PF-450, PF-451, PF-452, |
| | PF-453, PF-454, PF-455, PF-457, PF-458, PF-469, PF-460, PF-461, PF- |
| | 462, PF-464, PF-465, PF-466, PF-467, PF-468, PF-469, PF-471, PF-472, |
| | PF-473, PF-474, PF-475, PF-476, PF-477, PF-478, PF-479, PF-480, PF- |
| | 482, PF-485, PF-511, PF-512, PF-513, PF-514, PF-515, PF-516, PF-517, |
| | PF-518, PF-519, PF-520, PF-521, PF-522, PF-523, PF-524, PF-525, PF- |
| | 526, PF-527, PF-528, PF-529, PF-530, PF-531, PF-532, PF-533, PF-534, |
| | PF-535, PF-536, PF-537, PF-538, PF-539, PF-540, PF-541, PF-542, PF- |
| | 543, PF-544, PF-546, PF-548, PF-553, PF-555, PF-556, PF-558, PF-560, |
| | PF-562, PF-563, PF-566, PF-567, PF-572, PF-573, PF-575, PF-576, PF- |
| | 577, PF-578, PF-580, PF-581, PF-583, PF-585, PF-585, PF-586, PF-587, |
| | PF-589, PF-591, PF-592, PF-595, PF-596, PF-598, PF-599, PF-600, PF- |
| | 603, PF-605, PF-606, PF-607, PF-609, PF-610, PF-612, PF-614, PF-615, |
| | PF-617, PF-618, PF-619, PF-621, PF-622, PF-623, PF-624, PF-625, PF- |
| | 626, PF-627, PF-629, PF-631, PF-632, PF-634, PF-635, PF-636, PF-637, |
| | PF-638, PF-639, PF-640, PF-643, PF-644, PF-645, PF-646, PF-647, PF- |
| | 651, PF-652, PF-653, PF-654, PF-655, PF-657, PF-658, PF-659, PF-660, |
| | PF-662, PF-663, PF-664, PF-665, PF-666, PF-667, PF-668, PF-670, PF- |
| | 672, PF-675, PF-677, PF-681, PF-682, PF-683, PF-684, PF-685, PF-686, |
| | PF-687, PF-688, PF-690, PF-691, PF-693, PF-694, PF-695, PF-696, PF- |
| | 697, PF-698, PF-699, PF-700, PF-702, PF-704, PF-737, PF-741, PF-744, |
| | PF-745, PF-746, PF-748, PF-749, PF-752, PF-756, PF-757, PF-760, PF- |
| | 761, PF-762, PF-763, PF-764, PF-770, PF-776, PF-S003 |

Gram Negative Bacteria:

| | |
|---|---|
| A. baumannii | PF-531, PF-006, PF-538, PF-530 |
| C. jejuni | PF-006, PF-008, PF-033, PF-040, PF-053, PF-056, PF-057, PF-059, PF- |
| | 061, PF-063, PF-067, PF-068, PF-069, PF-071, PF-073, PF-140, PF-145, |
| | PF-148, PF-171, PF-175, PF-355, PF-356, PF-363, PF-366, PF-380, PF- |
| | 389, PF-390, PF-392, PF-393, PF-411, PF-418, PF-422, PF-425, PF-426, |
| | PF-431, PF-432, PF-456, PF-469, PF-470, PF-471, PF-472, PF-473, PF- |
| | 474, PF-475, PF-527, PF-548, PF-555, PF-556, PF-558, PF-559, PF-560, |
| | PF-562, PF-563, PF-564, PF-566, PF-567, PF-575, PF-576, PF-577, PF- |
| | 581, PF-584, PF-585, PF-586, PF-590, PF-591, PF-592, PF-595, PF-596, |
| | PF-598, PF-599, PF-601, PF-605, PF-607, PF-609, PF-610, PF-614, PF- |
| | 615, PF-S003 |
| E. coli | PF-007, PF-040, PF-053, PF-057, PF-068, PF-178, PF-344, PF-347, PF- |
| | 349, PF-350, PF-355, PF-360, PF-362, PF-363, PF-366, PF-369, PF-370, |
| | PF-374, PF-375, PF-376, PF-379, PF-380, PF-381, PF-383, PF-385, PF- |
| | 386, PF-387, PF-390, PF-395, PF-396, PF-398, PF-399, PF-401, PF-403, |
| | PF-410, PF-411, PF-413, PF-418, PF-425, PF-426, PF-427, PF-432, PF- |
| | 439, PF-440, PF-443, PF-444, PF-451, PF-452, PF-453, PF-454, PF-460, |
| | PF-469, PF-471, PF-473, PF-474, PF-478, PF-480, PF-514, PF-518, PF- |
| | 519, PF-524, PF-526, PF-528, PF-530, PF-531, PF-532, PF-533, PF-534, |
| | PF-536, PF-540, PF-541, PF-543, PF-546, PF-576, PF-577, PF-578, PF- |
| | 584, PF-586, PF-592, PF-595, PF-596, PF-598, PF-600, PF-603, PF-605, |
| | PF-606, PF-610, PF-612, PF-615, PF-619, PF-624, PF-634, PF-741, PF- |
| | 746, PF-761, PF-770, PF-776 |
| F. nucleatum | PF-C055, PF-C061, PF-C062, PF-C064, PF-C065, PF-C069, PF-C071, |
| | PF-C072, PF-C075, PF-C084, PF-C086, PF-C088, PF-C091, PF-C095, |
| | PF-C098, PF-C120, PF-C131, PF-C135, PF-C136, PF-C137, PF-C143, |
| | PF-C145, PF-C181, PF-C194, PF-C214, PF-C291, PF-C293 |
| M. xanthus | G-5, G-6, G-7 |
| P. aeruginosa | PF-053, PF-063, PF-067, PF-128, PF-140, PF-143, PF-168, PF-204, PF- |
| | 209, PF-355, PF-356, PF-366, PF-380, PF-411, PF-425, PF-432, PF-454, |
| | PF-458, PF-471, PF-474, PF-527, PF-531, PF-535, PF-536, PF-575, PF- |
| | 577, PF-605, PF-746, PF-761, PF-S003 |
| P. gingivalis | PF-C052, PF-C072, PF-C075, PF-C084, PF-C088, PF-C089, PF-C136, |
| | PF-C180, PF-C194, C293 |
| P. mirabilis | PF-040, PF-578, PF-612, PF-624, PF-634, PF-741, PF-770 |

Yeast Fungi:

| | |
|---|---|
| A. niger | PF-531, PF-527, PF-672, PF-545, PF-168, PF-448, PF-525, PF-529, PF- |
| | 148 |
| C. albicans | PF-053, PF-056, PF-057, PF-071, PF-140, PF-148, PF-175, PF-278, PF- |
| | 307, PF-425, PF-426, PF-474, PF-475, PF-526, PF-527, PF-528, PF-545, |
| | PF-605, PF-606, PF-617, PF-627, PF-632, PF-635, PF-636, PF-639, PF- |
| | 640, PF-645, PF-646, PF-647, PF-654, PF-668, PF-672, PF-684, PF-686, |
| | PF-697, PF-698, PF-S003 |
| T. rubrum | PF-283, PF-307, PF-527, PF-531, PF-547, PF-672 |

[0123] In certain embodiments the activity against a particular microorganism or group of microorganisms can be increased by increasing the number of peptides or peptide domains with activity against that microorganism or group of microorganisms.

[0124] Thus, for example, in certain embodiments, a peptide or composition effective to kill or inhibit the growth and/or proliferation of a yeast or fungus can comprise or more peptides and/or one or more peptide domains having sequences selected from the sequences shown in Tables 4, 5, or 6 (e.g., PF-S003, PF-053, PF-056, PF-057, PF-071, PF-140, PF-148, PF-168, PF-175, PF-278, PF-283, PF-307, PF-425, PF-426, PF-448, PF-474, PF-475, PF-525, PF-526, PF-527, PF-528, PF-529, PF-531, PF-545, PF-547, PF-606, PF-617, PF-627, PF-632, PF-635, PF-636, PF-639, PF-640, PF-645, PF-646, PF-647, PF-654, PF-668, PF-672, PF-684, PF-686, PF-697, and PF-69)8. A peptide or composition effective to kill or inhibit the growth and/or proliferation of Aspergillus niger can comprise one or more peptides and/or one or more peptide domains having sequences selected from the group consisting of PF-531, PF-527, PF-672, PF-545, PF-168, PF-448, PF-525, PF-529, and PF-148. A peptide or composition effective to kill or inhibit the growth and/or proliferation of Candida albicans can comprise one or more peptides and/or one or more peptide domains having sequences selected from the group consisting of PF-053, PF-056, PF-057, PF-071, PF-140, PF-148, PF-175, PF-278, PF-307, PF-425, PF-426, PF-474, PF-475, PF-526, PF-527, PF-528, PF-545, PF-605, PF-606, PF-617, PF-627, PF-632, PF-635, PF-636, PF-639, PF-640, PF-645, PF-646, PF-647, PF-654, PF-668, PF-672, PF-684, PF-686, PF-697, PF-698, and PF-S003. A peptide or composition effective to kill or inhibit the growth and/or proliferation of Trichophyton rubrum can comprise one or more peptides and/or one or more peptide domains having sequences selected from the group consisting of PF-283, PF-307, PF-527, PF-531, PF-547, and PF-672.

[0125] In certain embodiments a peptide or composition effective to kill or inhibit the growth and/or proliferation of a bacterium can comprise one or more peptides and/or one or more peptide domains comprising or consisting of sequences identified as having activity against a bacterium in Tables 4, 5, or 6.

[0126] In certain embodiments a peptide or composition effective to kill or inhibit the growth and/or proliferation of a gram positive bacterium can comprise one or more peptides and/or one or more peptide domains comprising or consisting of sequences identified as having activity against a gram positive bacterium in Tables 4, 5, or 6. In certain embodiments a peptide or composition effective to kill or inhibit the growth and/or proliferation of a gram negative bacterium can comprise one or more peptides and/or one or more peptide domains comprising or consisting of sequences identified as having activity against a gram negative bacterium in Tables 4, 5, or 6.

[0127] In certain embodiments a peptide or composition effective to kill or inhibit the growth and/or proliferation of A. naeslundii can comprise one or more peptides and/or one or more peptide domains comprising or consisting of sequences identified as having activity against A. Naeslundii in Tables 4, 5, or 6 (e.g., from the group consisting of PF-531, PF-527, PF-672, PF-545, PF-168, PF-448, PF-525, PF-529, and PF-148).

[0128] In certain embodiments a peptide or composition effective to kill or inhibit the growth and/or proliferation of B. subtilis can comprise one or more peptides and/or one or more peptide domains comprising or consisting of sequences identified as having activity against B. subtilis in Tables 4, 5, or 6 (e.g., from the group consisting of PF-002, PF-005, PF-006, PF-040, PF-053, PF-056, PF-061, PF-063, PF-067, PF-068, PF-069, PF-070, PF-071, PF-145, PF-148, PF-171, PF-175, PF-283, PF-289, PF-292, PF-296, PF-297, PF-301, PF-303, PF-305, PF-306, PF-307, PF-318, PF-319, PF-322, PF-335, PF-339, PF-342, PF-497, PF-499, PF-527, PF-531, PF-545, PF-547, PF-548, PF-549, PF-550, PF-552, PF-553, PF-554, PF-556, PF-557, PF-558, PF-559, PF-560, PF-561, PF-563, PF-564, PF-565, PF-566, PF-569, PF-571, PF-572, PF-574, PF-632, PF-636, PF-655, PF-659, PF-668, PF-670, PF-672, PF-686, PF-998, and PF-2003).

[0129] In certain embodiments a peptide or composition effective to kill or inhibit the growth and/or proliferation of C. difficile can comprise one or more peptides and/or one or more peptide domains comprising or consisting of sequences identified as having activity against C. difficile in Tables 4, 5, or 6 (e.g., from the group consisting of PF-522, PF-531, and PF-538).

[0130] In certain embodiments a peptide or composition effective to kill or inhibit the growth and/or proliferation of C. jeikeium can comprise one or more peptides and/or one or more peptide domains comprising or consisting of sequences identified as having activity against C. jeikeium in Tables 4, 5, or 6 (e.g., from the group consisting of PF-001, PF-003, PF-004, PF-101, PF-011, PF-012, PF-013, PF-021, PF-022, PF-025, PF-028, PF-030, PF-032, PF-033, PF-036, PF-037, PF-040, PF-042, PF-043, PF-046, PF-048, PF-052, PF-053, PF-056, PF-057, PF-063, PF-065, PF-067, PF-068, PF-073, PF-075, PF-076, PF-099, PF-124, PF-127, PF-129, PF-133, PF-135, PF-137, PF-139, PF-140, PF-145, PF-148, PF-164, PF-173, PF-176, PF-186, PF-188, PF-190, PF-191, PF-196, PF-199, PF-203, PF-204, PF-208, PF-527, PF-531, PF-545, PF-546, PF-548, PF-553, PF-556, PF-564, PF-566, PF-567, PF-575, PF-622, PF-523, PF-629, PF-632, PF-635, PF-637, PF-657, PF-668, PF-672, PF-681, PF-685, and PF-S003).

[0131] In certain embodiments a peptide or composition effective to kill or inhibit the growth and/or proliferation of E. faecalis can comprise one or more peptides and/or one or more peptide domains comprising or consisting of sequences identified as having activity against E. faecalis in Tables 4, 5, or 6 (e.g., from the group consisting of PF-007, PF-053, PF-057, PF-068, PF-347, PF-349, PF-355, PF-356, PF-363, PF-366, PF-369, PF-374, PF-375, PF-376, PF-379, PF-380, PF-381, PF-386, PF-387, PF-389, PF-390, PF-392, PF-393, PF-394, PF-396, PF-398, PF-399, PF-401, PF-407, PF-410, PF-411, PF-418, PF-422, PF-425, PF-426, PF-427, PF-429, PF-431, PF-432, PF-439, PF-440, PF-444, PF-447, PF-450, PF-451, PF-452, PF-454, PF-456, PF-460, PF-461, PF-469, PF-470, PF-471, PF-472, PF-473, PF-474, PF-475, PF-480, PF-484, PF-514, PF-518, PF-519, PF-524, PF-530, PF-532, PF-533, PF-534, PF-536, PF-544, PF-545, PF-546, PF-547, PF-556, PF-577, PF-581, PF-582, PF-584, PF-585, PF-586, PF-588, PF-591, PF-592, PF-593, PF-594, PF-595, PF-596, PF-597, PF-598, PF-599, PF-601, PF-602, PF-604, PF-605, PF-607, PF-609, PF-610, PF-613, PF-614, PF-615, PF-616, PF-617, PF-618, PF-621, PF-622, PF-623, PF-627, PF-629, PF-631, PF-632, PF-635, PF-636, PF-637, PF-638, PF-639, PF-640, PF-643, PF-649, PF-657, PF-664, PF-667, PF-668, PF-672, PF-675, PF-677, PF-681, PF-684, PF-685, PF-686, PF-690, PF-695, and PF-698).

[0132] In certain embodiments a peptide or composition effective to kill or inhibit the growth and/or proliferation of M. luteus can comprise one or more peptides and/or one or more peptide domains comprising or consisting of sequences identified as having activity against M. luteus in Tables 4, 5, or 6 (e.g., from the group consisting of PF-001, PF-003, PF-004, PF-006, PF-007, PF-010, PF-012, PF-013, PF-020, PF-021, PF-022, PF-025, PF-030, PF-036, PF-037, PF-040, PF-042, PF-043, PF-051, PF-052, PF-053, PF-056, PF-057, PF-063, PF-067, PF-068, PF-071, PF-073, PF-075, PF-076, PF-125, PF-127, PF-137, PF-139, PF-140, PF-145, PF-148, PF-171, PF-175, PF-176, PF-199, PF-204, PF-212, PF-215, PF-224, PF-226, PF-234, PF-235, PF-249, PF-250, PF-255, PF-257, PF-264, PF-270, PF-271, PF-274, PF-276, PF-278, PF-357, PF-527, PF-543, PF-548, PF-556, PF-562, PF-566, PF-567, PF-578, PF-580, PF-600, PF-603, PF-612, PF-624, PF-634, PF-741, PF-745, PF-746, PF-761, PF-763, PF-770, PF-776, and PF-S003).

[0133] In certain embodiments a peptide or composition effective to kill or inhibit the growth and/or proliferation of MRSA can comprise one or more peptides and/or one or more peptide domains comprising or consisting of sequences identified as having activity against MRSA in Tables 4, 5, or 6 (e.g., from the group consisting of PF-001, PF-003, PF-004, PF-006, PF-007, PF-010, PF-011, PF-012, PF-013, PF-015, PF-017, PF-019, PF-020, PF-021, PF-022, PF-023, PF-024, PF-025, PF-026, PF-027, PF-028, PF-029, PF-030, PF-031, PF-033, PF-035, PF-036, PF-037, PF-040, PF-041, PF-042, PF-043, PF-045, PF-046, PF-048, PF-049, PF-051, PF-052, PF-053, PF-056, PF-057, PF-058, PF-063, PF-064, PF-065, PF-066, PF-067, PF-068, PF-071, PF-073, PF-074, PF-075, PF-076, PF-140, PF-145, PF-148, PF-149, PF-156, PF-168, PF-171, PF-178, PF-191, PF-209, PF-347, PF-349, PF-350, PF-354, PF-355, PF-356, PF-357, PF-360, PF-362, PF-366, PF-369, PF-370, PF-373, PF-374, PF-375, PF-376, PF-378, PF-379, PF-380, PF-381, PF-382, PF-386, PF-387, PF-389, PF-390, PF-392, PF-393, PF-394, PF-395, PF-396, PF-398, PF-399, PF-401, PF-403, PF-404, PF-405, PF-406, PF-407, PF-408, PF-410, PF-411, PF-413, PF-417, PF-418, PF-422, PF-425, PF-426, PF-427, PF-429, PF-430, PF-431, PF-432, PF-439, PF-440, PF-442, PF-443, PF-444, PF-447, PF-450, PF-451, PF-452, PF-453, PF-454, PF-458, PF-460, PF-461, PF-469, PF-471, PF-472, PF-473, PF-474, PF-475, PF-478, PF-480, PF-518, PF-519, PF-524, PF-526, PF-527, PF-528, PF-530, PF-532, PF-533, PF-534, PF-536, PF-539, PF-540, PF-543, PF-544, PF-545, PF-546, PF-547, PF-548, PF-549, PF-551, PF-553, PF-555, PF-556, PF-558, PF-560, PF-561, PF-562, PF-564, PF-565, PF-566, PF-567, PF-576, PF-577, PF-578, PF-580, PF-581, PF-583, PF-584, PF-585, PF-586, PF-589, PF-592, PF-595, PF-596, PF-598, PF-599, PF-600, PF-603, PF-605, PF-606, PF-607, PF-609, PF-610, PF-612, PF-613, PF-615, PF-619, PF-622, PF-623, PF-624, PF-627, PF-629, PF-630, PF-632, PF-634, PF-635, PF-637, PF-638, PF-639, PF-652, PF-643, PF-654, PF-655, PF-656, PF-657, PF-658, PF-659, PF-661, PF-664, PF-667, PF-778, PF-672, PF-677, PF-680, PF-683, PF-685, PF-686, PF-690, PF-692, PF-694, PF-695, PF-738, PF-741, PF-745, PF-746, PF-760, PF-761, PF-763, PF-764, PF-770, PF-776, and PF-S003).

[0134] In certain embodiments a peptide or composition effective to kill or inhibit the growth and/or proliferation of S. epidermidis can comprise one or more peptides and/or one or more peptide domains comprising or consisting of sequences identified as having activity against of S. epidermidis in Tables 4, 5, or 6 (e.g., from the group consisting of PF-001, PF-003, PF-004, PF-006, PF-007, PF-009, PF-010, PF-012, PF-013, PF-020, PF-021, PF-022, PF-024, PF-025, PF-027, PF-028, PF-030, PF-032, PF-033, PF-034, PF-036, PF-037, PF-040, PF-041, PF-042, PF-043, PF-046, PF-048, PF-051, PF-052, PF-953, PF-956, PF-957, PF-961, PF-963, PF-964, PF-965, PF-967, PF-968, PF-971, PF-073, PF-074, PF-075, PF-076, PF-099, PF-123, PF-124, PF-125, PF-127, PF-128, PF-129, PF-137, PF-139, PF-140, PF-145, PF-148, PF-153, PF-157, PF-171, PF-173, PF-176, PF-178, PF-180, PF-186, PF-190, PF-191, PF-192, PF-196, PF-199, PF-203, PF-204, PF-208, PF-209, PF-226, PF-233, PF-273, PF-278, PF-283, PF-290, PF-292, PF-293, PF-294, PF-296, PF-297, PF-301, PF-307, PF-310, PF-313, PF-318, PF-319, PF-322, PF-335, PF-339, PF-342, PF-347, PF-349, PF-350, PF-355, PF-356, PF-357, PF-360, PF-363, PF-366, PF-369, PF-370, PF-373, PF-374, PF-375, PF-376, PF-378, PF-379, PF-380, PF-381, PF-383, PF-386, PF-387, PF-389, PF-390, PF-393, PF-395, PF-396, PF-397, PF-398, PF-399, PF-401, PF-403, PF-404, PF-406, PF-407, PF-408, PF-410, PF-411, PF-413, PF-417, PF-418, PF-422, PF-425, PF-246, PF-249, PF-430, PF-431, PF-432, PF-439, PF-440, PF-444, PF-447, PF-451, PF-452, PF-453, PF-454, PF-460, PF-469, PF-471, PF-473, PF-474, PF-475, PF-478, PF-480, PF-514, PF-518, PF-526, PF-527, PF-528, PF-530, PF-531, PF-533, PF-534, PF-536, PF-540, PF-543, PF-544, PF-546, PF-547, PF-548, PF-556, PF-558, PF-562, PF-576, PF-577, PF-578, PF-580, PF-583, PF-584, PF-585, PF-586, PF-592, PF-595, PF-596, PF-598, PF-599, PF-600, PF-603, PF-605, PF-606, PF-607, PF-610, PF-612, PF-613, PF-614, PF-615, PF-616, PF-619, PF-622, PF-623, PF-624, PF-627, PF-632, PF-634, PF-635, PF-637, PF-638, PF-655, PF-657, PF-659, PF-664, PF-667, PF-778, PF-672, PF-677, PF-681, PF-683, PF-685, PF-686, PF-690, PF-741, PF-746, PF-760, PF-761, PF-763, PF-770, PF-776, and PF-S003).

[0135] In certain embodiments a peptide or composition effective to kill or inhibit the growth and/or proliferation of S. mutans can comprise one or more peptides and/or one or more peptide domains comprising or consisting of sequences identified as having activity against S. mutans in Tables 4, 5, or 6 (e.g., from the group consisting of G-1, G-2, G-4, G-8, PF-020, PF-040, PF-051, PF-531, PF-543, PF-547, PF-578, PF-583, PF-600, PF-606, PF-612, PF-624, PF-634, PF-741, PF-745, PF-746, PF-761, PF-770, PF-776, PF-C055, PF-C057, PF-C058, PF-C061, PF-C062, PF-C072, PF-C075, PF-C084, PF-C085, PF-C088, PF-C098, PF-C131, PF-C135, PF-C139, PF-C142, PF-C146, PF-C180, PF-C194, PF-C281, PF-C290, PF-C291, PF-C293

[0136] In certain embodiments a peptide or composition effective to kill or inhibit the growth and/or proliferation of S. pneumoniae can comprise one or more peptides and/or one or more peptide domains comprising or consisting of sequences identified as having activity against S. pneumoniae in Tables 4, 5, or 6 (e.g., from the group consisting of PF-002, PF-005, PF-006, PF-020, PF-033, PF-040, PF-051, PF-053, PF-056, PF-057, PF-061, PF-063, PF-068, PF-071, PF-073, PF-140, PF-144, PF-145, PF-148, PF-171, PF-175, PF-178, PF-220, PF-355, PF-356, PF-357, PF-363, PF-366, PF-380, PF-389, PF-390, PF-393, PF-407, PF-411, PF-414, PF-415, PF-416, PF-417, PF-418, PF-419, PF-421, PF-422, PF-423, PF-424, PF-425, PF-426, PF-427, PF-428, PF-429, PF-430, PF-431, PF-432, PF-433, PF-434, PF-437, PF-439, PF-440, PF-442, PF-443, PF-444, PF-445, PF-446, PF-447, PF-448, PF-449, PF-450, PF-451, PF-452, PF-453, PF-454, PF-455, PF-457, PF-458, PF-469, PF-460, PF-461, PF-462, PF-464, PF-465, PF-466, PF-467, PF-468, PF-469, PF-471, PF-472, PF-473, PF-474, PF-475, PF-476, PF-477, PF-478, PF-479, PF-480, PF-482, PF-485, PF-511, PF-512, PF-513, PF-514, PF-515, PF-516, PF-517, PF-518, PF-519, PF-520, PF-521, PF-522, PF-523, PF-524, PF-525, PF-526, PF-527, PF-528, PF-529, PF-530, PF-531, PF-532, PF-533, PF-534, PF-535, PF-536, PF-537, PF-538, PF-539, PF-540, PF-541, PF-542, PF-543, PF-544, PF-546, PF-548, PF-553, PF-555, PF-556, PF-558, PF-560, PF-562, PF-563, PF-566, PF-567, PF-572, PF-573, PF-575, PF-576, PF-577, PF-578, PF-580, PF-581, PF-583, PF-585, PF-585, PF-586, PF-587, PF-589, PF-591, PF-592, PF-595, PF-596, PF-598, PF-599, PF-600, PF-603, PF-605, PF-606, PF-607, PF-609, PF-610, PF-612, PF-614, PF-615, PF-617, PF-618, PF-619, PF-621, PF-622, PF-623, PF-624, PF-625, PF-626, PF-627, PF-629, PF-631, PF-632, PF-634, PF-635, PF-636, PF-637, PF-638, PF-639, PF-640, PF-643, PF-644, PF-645, PF-646, PF-647, PF-651, PF-652, PF-653, PF-654, PF-655, PF-657, PF-658, PF-659, PF-660, PF-662, PF-663, PF-664, PF-665, PF-666, PF-667, PF-668, PF-670, PF-672, PF-675, PF-677, PF-681, PF-682, PF-683, PF-684, PF-685, PF-686, PF-687, PF-688, PF-690, PF-691, PF-693, PF-694, PF-695, PF-696, PF-697, PF-698, PF-699, PF-700, PF-702, PF-704, PF-737, PF-741, PF-744, PF-745, PF-746, PF-748, PF-749, PF-752, PF-756, PF-757, PF-760, PF-761, PF-762, PF-763, PF-764, PF-770, PF-776, and PF-S003).

[0137] In certain embodiments a peptide or composition effective to kill or inhibit the growth and/or proliferation of A. baumannii can comprise one or more peptides and/or one or more peptide domains comprising or consisting of sequences identified as having activity against A. baumannii in Tables 4, 5, or 6 (e.g., from the group consisting of PF-531, PF-006, PF-538, and PF-530).

[0138] In certain embodiments a peptide or composition effective to kill or inhibit the growth and/or proliferation of C. jejuni can comprise one or more peptides and/or one or more peptide domains comprising or consisting of sequences identified as having activity against C. jejuni in Tables 4, 5, or 6 (e.g., from the group consisting of PF-006, PF-008, PF-033, PF-040, PF-053, PF-056, PF-057, PF-059, PF-061, PF-063, PF-067, PF-068, PF-069, PF-071, PF-073, PF-140, PF-145, PF-148, PF-171, PF-175, PF-355, PF-356, PF-363, PF-366, PF-380, PF-389, PF-390, PF-392, PF-393, PF-411, PF-418, PF-422, PF-425, PF-426, PF-431, PF-432, PF-456, PF-469, PF-470, PF-471, PF-472, PF-473, PF-474, PF-475, PF-527, PF-548, PF-555, PF-556, PF-558, PF-559, PF-560, PF-562, PF-563, PF-564, PF-566, PF-567, PF-575, PF-576, PF-577, PF-581, PF-584, PF-585, PF-586, PF-590, PF-591, PF-592, PF-595, PF-596, PF-598, PF-599, PF-601, PF-605, PF-607, PF-609, PF-610, PF-614, PF-615, and PF-S003).

[0139] In certain embodiments a peptide or composition effective to kill or inhibit the growth and/or proliferation of E. coli can comprise one or more peptides and/or one or more peptide domains comprising or consisting of sequences identified as having activity against E. coli in Tables 4, 5, or 6 (e.g., from the group consisting of PF-007, PF-040, PF-053, PF-057, PF-068, PF-178, PF-344, PF-347, PF-349, PF-350, PF-355, PF-360, PF-362, PF-363, PF-366, PF-369, PF-370, PF-374, PF-375, PF-376, PF-379, PF-380, PF-381, PF-383, PF-385, PF-386, PF-387, PF-390, PF-395, PF-396, PF-398, PF-399, PF-401, PF-403, PF-410, PF-411, PF-413, PF-418, PF-425, PF-426, PF-427, PF-432, PF-439, PF-440, PF-443, PF-444, PF-451, PF-452, PF-453, PF-454, PF-460, PF-469, PF-471, PF-473, PF-474, PF-478, PF-480, PF-514, PF-518, PF-519, PF-524, PF-526, PF-528, PF-530, PF-531, PF-532, PF-533, PF-534, PF-536, PF-540, PF-541, PF-543, PF-546, PF-576, PF-577, PF-578, PF-584, PF-586, PF-592, PF-595, PF-596, PF-598, PF-600, PF-603, PF-605, PF-606, PF-610, PF-612, PF-615, PF-619, PF-624, PF-634, PF-741, PF-746, PF-761, PF-770, and PF-776).

[0140] In certain embodiments a peptide or composition effective to kill or inhibit the growth and/or proliferation of F. nucleatum can comprise one or more peptides and/or one or more peptide domains comprising or consisting of sequences identified as having activity against F. nucleatum in Tables 4, 5, or 6 (e.g., from the group consisting of PF-C055, PF-C061, PF-C062, PF-C064, PF-C065, PF-C069, PF-C071, PF-C072, PF-C075, PF-C084, PF-C086, PF-C088, PF-C091, PF-C095, PF-C098, PF-C120, PF-C131, PF-C135, PF-C136, PF-C137, PF-C143, PF-C145, PF-C181, PF-C194, PF-C214, PF-C291, and PF-C293).

[0141] In certain embodiments a peptide or composition effective to kill or inhibit the growth and/or proliferation of M. Xanthus can comprise one or more peptides and/or one or more peptide domains comprising or consisting of sequences identified as having activity against M. Xanthus in Tables 4, 5, or 6 (e.g., from the group consisting of G-5, G-6, and G-7).

[0142] In certain embodiments a peptide or composition effective to kill or inhibit the growth and/or proliferation of P. aeruginosa can comprise one or more peptides and/or one or more peptide domains comprising or consisting of sequences identified as having activity against P. aeruginosa in Tables 4, 5, or 6 (e.g., from the group consisting of PF-053, PF-063, PF-067, PF-128, PF-140, PF-143, PF-168, PF-204, PF-209, PF-355, PF-356, PF-366, PF-380, PF-411, PF-425, PF-432, PF-454, PF-458, PF-471, PF-474, PF-527, PF-531, PF-535, PF-536, PF-575, PF-577, PF-605, PF-746, PF-761, and PF-S003).

[0143] In certain embodiments a peptide or composition effective to kill or inhibit the growth and/or proliferation of P. gingivalis can comprise one or more peptides and/or one or more peptide domains comprising or consisting of sequences identified as having activity against P. gingivalis in Tables 4, 5, or 6 (e.g., from the group consisting of PF-C052, PF-C072, PF-C075, PF-C084, PF-C088, PF-C089, PF-C136, PF-C180, PF-C194, and C293).

[0144] In certain embodiments a peptide or composition effective to kill or inhibit the growth and/or proliferation of P. mirabilis can comprise one or more peptides and/or one or more peptide domains comprising or consisting of sequences identified as having activity against P. mirabilis in Tables 4, 5, or 6 (e.g., from the group consisting of PF-040, PF-578, PF-612, PF-624, PF-634, PF-741, and PF-770).

[0145] It was also a surprising discovery that a number of novel antimicrobial peptides are characterized by the presence of particular amino acid motifs. Such motifs include KIF, FIK, KIH, HIK, and KIV, as illustrated in Table 7.

TABLE 7
Antimicrobial peptides characterized
by particular motifs.

| | | | SEQ ID |
|---|---|---|---|
| Motif | Omnibus # | Sequence | NO |
| KIF | PF-278 | LSLATFAKIFMTRSNWSLKRFNRL | 1567 |
| | PF-C059 | QKIIDMSKFLFSLILFIMIVVIYIGKSIGGYSAIVSS | 1568 |
| | | IMLELDTVLYNKKIFFIYK | |
| | PF-C073 | FESLLPQATKKIVNNKGSKINKIF | 1569 |
| | PF-C085 | KKFKIFVIINWFYHKYIILNFEENF | 1570 |
| | PF-531 | YIQFHLNQQPRPKVKKIKIFL | 1571 |
| | PF-C194 | NTNDLLQAFELMGLGMAGVFIVLGILYIVAELLI | 1572 |
| | | KIFPVNN | |
| | PF-C201 | IFKLFEEHLLYLLDAFYYSKIFRRLKQGLYRRKE | 1573 |
| | | QPYTQDLFRM | |
| | PF-442 | MQIFYIKTKIFLSFFLFLLIFSQCFYKIEE | 1574 |
| | PF-C252 | NYRLVNAIFSKIFKKKFIKF | 1575 |
| FIK | PF-251 | MAWKFIKLDKVVSQKECNNFLEKEENKKLLKL | 1576 |
| | | LRIQKNMR | |
| | PF-261 | MDIWKFIKSFNTVNTYLLLSCVLLIILVLYFYVI | 1577 |
| | | NPA | |
| | PF-497 | LVLRICTDLFTFIKWTIKQRKS | 1578 |
| | PF-775 | DLCGQEFIKFKTCVTNQLAKK | 1579 |
| | PF-591 | DLLKSLLGQDGAKNDEIIEFIKIIMEK | 1580 |
| | PF-597 | DEIKVSDEEIEKFIKENNL | 1581 |
| | PF-608 | LICEVVKPEEDFIKVKLNEDNVTAKISREFIAKKI | 1582 |
| | | DA | |
| | IT-133 | YFIKDDNEALSKDWEVIGNDLKGTIDKYGKEFK | 1583 |
| | | VR | |
| | PF-C252 | NYRLVNAIFSKIFKKKFIKF | 1584 |
| | PF-C278 | DMKIIKLYIKILSFLFIKYCNKKLNSVKLKA | 1585 |
| | PF-C290 | GNVHPESDFHNLIQFIKTFLYFTIFFKYFL | 1586 |
| | PF-006 | MGIIAGIIKFIKGLIEKFTGK | 1587 |
| | PF-013 | LIQKGLNQTFIVVIRLNNFIKKS | 1588 |
| | PF-040 | MIHLTKQNTMEALHFIKQFYDMFFILNFNV | 1589 |
| KIH | PF-252 | MKKLVAALAVIVILTGCVYDPVNYDKIHDQEF | 1590 |
| | | QDHLRQNG | |
| | PF-575 | LNFRAENKILEKIHISLIDTVEGSA | 1591 |
| | PF-533 | KTPNDKIHKTIIIKHIIL | 1592 |
| HIK | PF-222 | HIKETR | 1593 |
| | PF-319 | SIGSMIGMYSFRHKTKHIKFTFGIPFILFLQFLLV | 1594 |
| | | YFYILK | |
| | PF-477 | HKNKLNIPHIKS | 1595 |
| KIV | PF-272 | MTLTIKIKHRSKIVPLNLISLVYAFFTYNFVANRI | 1596 |
| | | MFLTND | |
| | PF-758 | PEIIKIVSGLL | 1597 |
| | PF-336 | MLTSRKKRLKKIVEEQNKKDESI | 1598 |
| | PF-C073 | FESLLPQATKKIVNNKGSKINKIF | 1599 |
| | PF-721 | TEQAKKIVDILNNWLE | 1600 |
| | PF-730 | FEDIEQIIKYHLIDGKIVAPLLLDR | 1601 |
| | PF-095 | KRGSKIVIAIAVVLIVLAGVWVW | 1602 |
| | PF-028 | ALDCSEQSVILWYETILDKIVGVIK | 1603 |
| VIK | PF-257 | VWENRKKYLENEIERHNVFLKLGQEVIKGLNA | 1604 |
| | | LASRGR | |
| | PF-226 | LMFFSENMDKRDTLSGKFRYFAGSKVIKLMNW | 1605 |
| | | LSENGK | |
| | PF-580 | EILNNNQVIKELTMKYKTQFESNLGGWTARARR | 1606 |
| | PF-366 | ALCSVIKAIELGIINVHLQ | 1607 |
| | PF-C092 | NGDKKAKEELDKWDEVIKELNIQF | 1608 |
| | PF-S028 | GSVIKKRRKRMSKKKHRKMLRRTRVQRRKLGK | 1609 |
| | PF-103 | VIKISVPGQVQMLIP | 1610 |
| | PF-527 | GSVIKKRRKRMAKKKHRKLLKKTRIQRRRAGK | 1611 |
| | PF-167 | AIEGVIKKGACFKLLRHEMF | 1612 |
| | PF-C166 | KRKHENVIVAEEMRVIKN | 1613 |
| | PF-007 | MGIIAGIIKVIKSLIEQFTGK | 1614 |
| | PF-071 | HCVIGNVVDIANLLKRRAVYRDIADVIKMR | 1615 |
| | PF-028 | ALDCSEQSVILWYETILDKIVGVIK | 1616 |
| PRP | PF-C031 | WSESQPPTATPRPHAEVARAGLVTPPTL | 1617 |
| | PF-752 | LHVIRPRPELSELKFPITKILKVNKQGLKK | 1618 |
| | PF-672 | MRFGSLALVAYDSAIKHSWPRPSSVRRLRM | 1619 |
| | PF-088 | VMFVLTRGRSPRPMIPAY | 1620 |
| | PF-143 | LSPRPIIVSRRSRADNNNDWSR | 1621 |
| | PF-168 | VLPFPAIPLSRRRACVAAPRPRSRQRAS | 1622 |
| | PF-531 | YIQFHLNQQPRPKVKKIKIFL | 1623 |

All groups are associated with antimicrobial activity

[0146] In certain embodiments, peptides described herein can have multiple activities. Thus for example, a peptide can have both binding/targeting activity and antimicrobial activity. Illustrative peptides having multiple activities are shown in Table 8. Such peptides can be used, e.g., in a chimeric construct, for any or all of these properties. Thus, for example, a peptide designated “B” in Table 8 can be used as a targeting peptide. If it is also designated G or M it can also be used for antimicrobial activity.

TABLE 8
Peptides having multiple activities.

| Peptide | Activities |
|---|---|
| PF-001 | G B |
| PF-002 | G B |
| PF-003 | G B |
| PF-004 | G B |
| PF-005 | G B |
| PF-006 | G B M |
| PF-007 | G B |
| PF-008 | G B |
| PF-009 | G B |
| PF-010 | G B |
| PF-011 | G B |
| PF-012 | G B |
| PF-013 | G B |
| PF-015 | G B |
| PF-017 | G B |
| PF-020 | G B |
| PF-021 | G B |
| PF-022 | G B |
| PF-023 | G B |
| PF-024 | G B |
| PF-025 | G B |
| PF-026 | G B |
| PF-027 | G B |
| PF-028 | G B |
| PF-029 | G B |
| PF-030 | G B |
| PF-031 | G B |
| PF-033 | G B |
| PF-034 | G B |
| PF-035 | G B |
| PF-036 | G B |
| PF-037 | G B |
| PF-040 | G B |
| PF-041 | G B |
| PF-042 | G B |
| PF-043 | G B |
| PF-045 | G B |
| PF-046 | G B |
| PF-048 | G B |
| PF-049 | G B |
| PF-051 | G B |
| PF-052 | G B |
| PF-053 | G B |
| PF-056 | G B |
| PF-057 | G B |
| PF-058 | G B |
| PF-061 | G B |
| PF-063 | G B |
| PF-064 | G B |
| PF-065 | G B |
| PF-066 | G B |
| PF-067 | G B |
| PF-068 | G B |
| PF-069 | G B |
| PF-070 | G B |
| PF-071 | G B |
| PF-073 | G B |
| PF-074 | G B |
| PF-075 | G B |
| PF-076 | G B |
| PF-099 | G B |
| PF-123 | G B |
| PF-124 | G B |
| PF-125 | G B |
| PF-127 | G B |
| PF-128 | G B |
| PF-129 | G B |
| PF-133 | G B |
| PF-135 | G B |
| PF-137 | G B |
| PF-139 | G B |
| PF-140 | G B |
| PF-143 | G B |
| PF-144 | G B |
| PF-145 | G B |
| PF-148 | G B M |
| PF-149 | G B |
| PF-153 | G B |
| PF-156 | G B |
| PF-157 | G B |
| PF-164 | G B |
| PF-168 | G B M |
| PF-171 | G B |
| PF-173 | G B |
| PF-175 | G B |
| PF-176 | G B |
| PF-178 | G B |
| PF-180 | G B |
| PF-186 | G B |
| PF-188 | G B |
| PF-190 | G B |
| PF-191 | G B |
| PF-192 | G B |
| PF-196 | G B |
| PF-203 | G B |
| PF-204 | G B |
| PF-208 | G B |
| PF-209 | G B M |
| PF-212 | G B |
| PF-215 | G B |
| PF-224 | G B |
| PF-226 | G B |
| PF-233 | G B |
| PF-234 | G B |
| PF-235 | G B |
| PF-249 | G B |
| PF-255 | G B |
| PF-257 | G B |
| PF-270 | G B |
| PF-271 | G B |
| PF-273 | G B |
| PF-276 | G B |
| PF-278 | G B M |
| PF-283 | G B M |
| PF-289 | G B |
| PF-292 | G B |
| PF-294 | G B |
| PF-297 | G B |
| PF-301 | G B |
| PF-305 | G B |
| PF-306 | G B |
| PF-307 | G B M |
| PF-313 | G B |
| PF-319 | G B |
| PF-322 | G M |
| PF-344 | G B |
| PF-347 | G B |
| PF-349 | G B |
| PF-350 | G B |
| PF-354 | G B |
| PF-355 | G B |
| PF-356 | G B |
| PF-357 | G B |
| PF-360 | G B |
| PF-362 | G B |
| PF-363 | G B |
| PF-366 | G B |
| PF-369 | G B |
| PF-370 | G B |
| PF-373 | G B |
| PF-374 | G B |
| PF-375 | G B |
| PF-376 | G B |
| PF-378 | G B |
| PF-379 | G B |
| PF-380 | G B |
| PF-381 | G B |
| PF-382 | G B |
| PF-383 | G B |
| PF-385 | G B |
| PF-386 | G B |
| PF-387 | G B |
| PF-389 | G B |
| PF-390 | G B |
| PF-392 | G B |
| PF-393 | G B |
| PF-394 | G B |
| PF-395 | G B |
| PF-396 | G B |
| PF-397 | G B |
| PF-398 | G B |
| PF-399 | G B |
| PF-401 | G B |
| PF-403 | G B |
| PF-404 | G B |
| PF-405 | G B |
| PF-406 | G B |
| PF-407 | G B |
| PF-408 | G B |
| PF-410 | G B |
| PF-411 | G B |
| PF-413 | G B |
| PF-414 | G B |
| PF-416 | G B |
| PF-417 | G B |
| PF-418 | G B |
| PF-421 | G B |
| PF-422 | G B |
| PF-423 | G B |
| PF-424 | G B |
| PF-425 | G B |
| PF-426 | G B |
| PF-427 | G B |
| PF-428 | G B |
| PF-429 | G B |
| PF-430 | G B |
| PF-431 | G B |
| PF-432 | G B |
| PF-433 | G B |
| PF-434 | G B |
| PF-437 | G M |
| PF-439 | G B |
| PF-440 | G B |
| PF-442 | G B |
| PF-443 | G B |
| PF-444 | G B |
| PF-445 | G B |
| PF-446 | G B |
| PF-447 | G B |
| PF-S003 | G B |
| PF-448 | G B M |
| PF-450 | G B |
| PF-451 | G B |
| PF-452 | G B |
| PF-453 | G B |
| PF-454 | G B |
| PF-456 | G B |
| PF-457 | G B |
| PF-458 | G B |
| PF-459 | G B |
| PF-460 | G B |
| PF-461 | G B |
| PF-462 | G B |
| PF-464 | G B |
| PF-465 | G B |
| PF-466 | G B |
| PF-467 | G B |
| PF-469 | G B |
| PF-470 | G B |
| PF-471 | G B |
| PF-472 | G B |
| PF-473 | G B |
| PF-474 | G B |
| PF-475 | G B |
| PF-476 | G B |
| PF-477 | G B |
| PF-478 | G B |
| PF-479 | G B |
| PF-480 | G B |
| PF-482 | G B |
| PF-484 | G B |
| PF-497 | B M |
| PF-499 | B M |
| PF-511 | G B M |
| PF-512 | G B M |
| PF-513 | G B |
| PF-514 | G B |
| PF-515 | G B |
| PF-516 | G |
| PF-517 | G B |
| PF-518 | G B |
| PF-519 | G B |
| PF-520 | G B M |
| PF-521 | G B M |
| PF-522 | G B M |
| PF-523 | B M |
| PF-524 | G B M |
| PF-525 | G M |
| PF-526 | G B |
| PF-527 | G B M |
| PF-528 | G B |
| PF-529 | G B M |
| PF-530 | G M |
| PF-531 | G M |
| PF-537 | G B |
| PF-538 | G M |
| PF-539 | G B |
| PF-540 | G B |
| PF-542 | G B |
| PF-543 | G B |
| PF-544 | G B |
| PF-545 | G B M |
| PF-546 | G B |
| PF-547 | G B M |
| PF-548 | G B |
| PF-549 | G B |
| PF-550 | G B |
| PF-551 | G B |
| PF-552 | G B |
| PF-553 | G B |
| PF-554 | G B |
| PF-555 | G B |
| PF-556 | G B |
| PF-557 | G B |
| PF-558 | G B |
| PF-559 | G B |
| PF-560 | G B |
| PF-562 | G B |
| PF-563 | G B |
| PF-564 | G B |
| PF-566 | G B |
| PF-567 | G B |
| PF-569 | G B |
| PF-572 | G B |
| PF-573 | G B |
| PF-575 | G B |
| PF-576 | G B |
| PF-577 | G B |
| PF-578 | G B |
| PF-580 | G B |
| PF-581 | G B |
| PF-583 | G B M |
| PF-584 | G B |
| PF-585 | G B |
| PF-586 | G B |
| PF-587 | G B |
| PF-588 | G B |
| PF-589 | G B |
| PF-590 | G B |
| PF-592 | G B |
| PF-593 | G B |
| PF-594 | G B |
| PF-595 | G B |
| PF-596 | G B |
| PF-597 | G B |
| PF-598 | G B |
| PF-599 | G B |
| PF-600 | G B M |
| PF-601 | G B |
| PF-602 | G B |
| PF-603 | G B |
| PF-604 | G B |
| PF-605 | G B |
| PF-606 | G M |
| PF-607 | G B |
| PF-609 | G B |
| PF-610 | G B |
| PF-612 | G B |
| PF-613 | G B |
| PF-614 | G B |
| PF-615 | G B |
| PF-616 | G B |
| PF-617 | G B |
| PF-619 | G B |
| PF-621 | G B |
| PF-622 | G B |
| PF-623 | G B |
| PF-625 | G B |
| PF-626 | G B |
| PF-627 | G B |
| PF-629 | G B |
| PF-630 | G B |
| PF-631 | G B |
| PF-632 | G B |
| PF-634 | G B |
| PF-635 | G B |
| PF-636 | G B |
| PF-637 | G B |
| PF-638 | G B |
| PF-639 | G B |
| PF-640 | G B |
| PF-642 | G B |
| PF-655 | G B |
| PF-664 | G B |
| PF-672 | G B M |
| PF-681 | G B |
| PF-686 | G B |
| PF-737 | G B |
| PF-738 | G B |
| PF-741 | G B |
| PF-744 | G B |
| PF-745 | G B |
| PF-746 | G B |
| PF-748 | G B |
| PF-749 | G B |
| PF-752 | G B |
| PF-756 | G B |
| PF-757 | G B |
| PF-760 | G B |
| PF-761 | G B |
| PF-762 | G B |
| PF-763 | G B |
| PF-764 | G B |
| PF-770 | G B |
| PF-776 | G B |
| PF-C052 | G B |
| PF-C055 | G B |
| PF-C057 | G B |
| PF-C058 | G B |
| PF-C061 | G B |
| PF-C062 | G B |
| PF-C064 | G B |
| PF-C065 | G B |
| PF-C069 | G B |
| PF-C071 | G B |
| PF-C072 | G B |
| PF-C075 | G B |
| PF-C084 | G B |
| PF-C085 | G B |
| PF-C086 | G B |
| PF-C088 | G B |
| PF-C091 | G B |
| PF-C095 | G B |
| PF-C098 | G B |
| PF-C120 | G B |
| PF-C131 | G B |
| PF-C135 | G B |
| PF-C136 | G B |
| PF-C137 | G B |
| PF-C139 | G B |
| PF-C142 | G B |
| PF-C143 | G B |
| PF-C145 | G B |
| PF-C180 | G B |
| PF-C181 | G B |
| PF-C194 | G B |
| PF-C281 | G B |
| PF-C290 | G B |
| PF-C291 | G B |

B: targeting/binding activity;
M: antimicrobial activity;
G: Growth or phenotype altering.

[0147] Other peptides believed to show binding, growth altering, and/or antimicrobial activity are shown in Table 9.

TABLE 9
Additional peptides believed to have binding,
growth altering, and/or antimicrobial activity.

| ID | Sequence | SEQ ID No. |
|---|---|---|
| PF-198 | RRLASRRSLVVST | 1624 |
| PF-227 | RLLGLYGENSAAGFIASVIGAVIILFIYNLIARKS | 1625 |
| PF-260 | GHLRVCWILWLQSANPLSFRHHYLAVMW | 1626 |
| PF-261 | MDIWKFIKSFNTVNTYLLLSCVLLIILVLYFYVINPA | 1627 |
| PF-277 | MIIQNKKIEKIYKYQTKEIFLNKTSLRAGFVFRMVRVLI | 1628 |
| PF-280 | MLIDWQEPDIEKSFCAAFLKISVSVLVYRTPLGYGNQLRE | 1629 |
| PF-286 | FFDGEVGCGC | 1630 |
| PF-287 | ILEQNIEEVFFIQS | 1631 |
| PF-312 | MDKIRIWNNFHISNEYIKQRYGIISIPLFYVYLF | 1632 |
| PF-321 | FAKKNPCRMRVPNTGTWYLVVNQDGNSGIVNFSINTIQN | 1633 |
| PF-327 | MLVFQMRYQMRYVDKTSTVLKQTKNSDYADK | 1634 |
| PF-330 | MLMNFEVYQQRILIIYNKCYHLKAVGKNLQLFIIVD | 1635 |
| PF-331 | MGRHLWNPSYFVATVSENTEEQIRKYINNQKKQVK | 1636 |
| PF-341 | DDKNEGKIAQGEY | 1637 |
| PF-391 | EASVYRE | 1638 |
| PF-420 | MVKHNFDVTDKTGKISSKHCFEITDKTDVV | 1639 |
| PF-708 | DRPSQTTHHTLSSSRITGPS | 1640 |
| PF-710 | EALLPPDPPDEDSQRIIPQ | 1641 |
| PF-713 | DRPSQTTHHTLSSSRITGPS | 1642 |
| PF-715 | LEDTKALFPCFVPI | 1643 |
| PF-718 | KKYSSFKSMIDDLEYDA | 1644 |
| PF-719 | FKSMIDDLEYDA | 1645 |
| PF-721 | TEQAKKIVDILNNWLE | 1646 |
| PF-722 | STSPSVTSVYAEALGLK | 1647 |
| PF-723 | VGAMAIFLNVVAMLAGV | 1648 |
| PF-725 | ARTIQNNGCLIHNSRYP | 1649 |
| PF-726 | CDDLYALEAQGTLNELLKK | 1650 |
| PF-729 | TPEPVVIVKP | 1651 |
| PF-730 | FEDIEQIIKYHLIDGKIVAPLLLDR | 1652 |
| PF-734 | SDIIAEMFQQGELEPMLRDAVAA | 1653 |
| PF-736 | KGSASGSASGSGSAK | 1654 |
| PF-739 | KSGASSVASAAKSG | 1655 |
| PF-742 | AAATTATTAK | 1656 |
| PF-743 | TKGTTTGTAKTTGVTTGTAK | 1657 |
| PF-769 | GSRGGAKRGGARG | 1658 |
| PF- | WSESQPPTATPRPHAEVARAGLVTPPTL | 1659 |
| C031 | | |
| PF- | QPIGFPTDSVHGTDLVHRLRGTTSSR | 1660 |
| C038 | | |
| PF- | LENLDIEGLTEMKEHIEDLIAEKSAAESIEEVIVEAE | 1661 |
| C077 | | |
| PF- | AYSLTFQNPNDNLTDEEVAKYMEKITKALTEKIGAEVR | 1662 |
| C205 | | |
| PF-S016 | PLTRETFAERGIRKARVARTFSEEEPPF | 1663 |

### III. Design and Construction of STAMPs and Other Chimeric Constructs.

[0148] In various embodiments this invention provides chimeric moieties comprising one or more targeting moieties attached to one or more effectors. The targeting moieties can be selected to preferentially bind to a target microorganism (e.g., bacteria, virus, fungi, yeast, alga, protozoan, etc.) or group of microorganisms (e.g., gram-negative or gram-positive bacteria, particular genus, species, etc.) In certain embodiments the targeting moiety comprises one or more novel microorganism-binding peptides as described herein (see, e.g., Table 3, and/or Table 10, and/or Table 12). In certain embodiments the targeting moiety comprises non-peptide moieties (e.g., antibodies, receptor, receptor ligand, lectin, and the like).

[0149] In various embodiments the effector comprises a moiety whose activity is to be delivered to the target microorganism(s), to a biofilm comprising the target microorganism(s), to a cell or tissue comprising the target microorganism(s), and the like. In certain embodiments the targeting moiety comprises one or more antimicrobial peptide(s) as described herein (see, e.g., Tables 4, 5 and/or 14), an antibiotic (including, but not limited to a steroid antibiotic), a detectable label, a porphyrin, a photosensitizing agent, an epitope tag, a lipid or liposome, a nanoparticle, a dendrimer, and the like.

[0150] In certain embodiments one or more targeting moieties are attached to a single effector. In certain embodiments one or more effectors are attached to a single targeting moiety. In certain embodiments multiple targeting moieties are attached to multiple effectors. The targeting moieties(s) can be attached directly to the effector(s) or through a linker. Where the targeting moiety and the effector comprise peptides the chimeric moiety can be a fusion protein.

[0151] A) Targeting Moieties.

[0152] In various embodiments this invention provides targeting moieties that preferentially and/or specifically bind to a microorganism (e.g., a bacterium, a fungus, a yeast, etc.). One or more such targeting moieties can be attached to one or more effectors to provide chimeric moieties that are capable of delivering the effector(s) to a target (e.g., a bacterium, a fungus, a yeast, a biofilm comprising the bacterium or fungus or yeast, etc.).

[0153] In various embodiments, targeting moieties include, but are not limited to peptides that preferentially bind particular microorganisms (e.g., bacteria, fungi, yeasts, protozoa, algae, viruses, etc.) or groups of such microorganisms, e.g., as described above, antibodies that bind particular microorganisms or groups of microorganisms, receptor ligands that bind particular microorganisms or groups of microorganisms, porphyrins (e.g., metalloporphyrins), lectins that bind particular microorganisms or groups of microorganisms, and the like. As indicated it will be appreciated that references to microorganisms or groups of microorganism include bacteria or groups of bacteria, viruses or groups of viruses, yeasts or groups of yeasts, protozoa or groups of protozoa, viruses or groups of viruses, and the like.

[0154] i. Targeting Peptides.

[0155] In certain embodiments, the targeting moiety comprises one or more targeting peptides that bind particular bacteria, fungi, and/or yeasts, and/or algae, and/or viruses and/or that bind particular groups of bacteria, and/or groups of fungi, and/or groups of yeasts, and/or groups of algae.

[0156] In certain embodiments the targeting peptide can comprise one or more domains capable of binding, specifically binding, or preferentially binding to a microorganism, e.g., a target microbial organism (see, e.g., Table 3). In certain embodiment, the targeting peptide be identified via screening peptide libraries. For example, a phage display peptide library can be screened against a target microbial organism or a desired antigen or epitope thereof. Any peptide identified through such screening can be used as a targeting peptide for the target microbial organism. Illustrative additional targeting peptides are shown in Table 10.

TABLE 10
Additional illustrative targeting moieties.

| | | SEQ |
|---|---|---|
| Targeting Moiety/ | | ID |
| Organism | Structure/sequence | NO |
| LPSB-1 | RGLRRLGRRGLRRLGR | 1664 |
| Phob-1 | KPVLPVLPVLPVL | 1665 |
| LPSB-2 | VLRIIRIAVLRIIRIA | 1666 |
| LPTG-1 | LPETGGSGGSLPETG | 1667 |
| α-1 | RAHIRRAHIRR | 1668 |
| ANION-1 | DEDEDDEEDDDEEE | 1669 |
| PHILIC-1 | STMCGSTMCGSTMCG | 1670 |
| SA5.1/S. aureus | VRLPLWLPSLNE | 1671 |
| SA5.3/S. aureus | ANYFLPPVLSSS | 1672 |
| SA5.4/S. aureus | SHPWNAQRELSV | 1673 |
| SA5.5/S. aureus | SVSVGMRPMPRP | 1674 |
| SA5.6/S. aureus | WTPLHPSTNRPP | 1675 |
| SA5.7/S. aureus | SVSVGMKPSPRP | 1676 |
| SA5.8/S. aureus | SVSVGMKPSPRP | 1677 |
| SA5.9/S. aureus | SVPVGPYNESQP | 1678 |
| SA5.10/S. aureus | WAPPLFRSSLFY | 1679 |
| SA2.2/S. aureus | WAPPXPXSSLFY | 1680 |
| SA2.4/S. aureus | HHGWTHHWPPPP | 1681 |
| SA2.5/S. aureus | SYYSLPPIFHIP | 1682 |
| SA2.6/S. aureus | HFQENPLSRGGEL | 1683 |
| SA2.7/S. aureus | FSYSPTRAPLNM | 1684 |
| SA2.8/S. aureus | SXPXXMKXSXXX | 1685 |
| SA2.9/S. aureus | VSRHQSWHPHDL | 1686 |
| SA2.10/S. aureus | DYXYRGLPRXET | 1687 |
| SA2.11/S. aureus | SVSVGMKPSPRP | 1688 |
| S. aureus/Consensus | V/Q/H-P/H-H-E-F/Y-K/H-H/A-L/H-X-X-K/R-P/L | 1689 |
| DH5.1/E coli. | KHLQNRSTGYET | 1690 |
| DH5.2/E coli. | HIHSLSPSKTWP | 1691 |
| DH5.3/E coli. | TITPTDAEMPFL | 1692 |
| DH5.4/E coli. | HLLESGVLERGM | 1693 |
| DH5.5/E coli. | HDRYHIPPLQLH | 1694 |
| DH5.6/E coli. | VNTLQNVRHMAA | 1695 |
| DH5.7/E coli. | SNYMKLRAVSPF | 1696 |
| DH5.8/E coli. | NLQMPYAWRTEF | 1697 |
| DH5.9/E coli. | QKPLTGPHFSLI | 1698 |
| CSP/S. mutans | SGSLSTFFRLFNRSFTQALGK | 1699 |
| CSPC18/S. mutans | LSTFFRLFNRSFTQALGK | 1700 |
| CSPC16/S. mutans | TFFRLFNRSFTQALGK | 1701 |
| CSPM8/S. mutans | TFFRLFNR | 1702 |
| KH/Pseudomonas spp | KKHRKHRKHRKH | 1703 |
| (US 2004/0137482) | | |
| cCF10 | LVTLVFV | 1704 |
| AgrD1 | YSTCDFIM | 1705 |
| AgrD2 | GVNACSSLF | 1706 |
| AgrD3 | YINCDFLL | 1707 |
| NisinA | ITSISLCTPGCKTGALMGCNMRTATCIICSIIIVSK | 1708 |
| PlnA | KSSAYSLQMGATAIKQVKKLFKKWGW | 1709 |
| S3L1-5 | WWYNWWQDW | 1710 |
| Penetratin | RQIKIWFWNRRMKWKK* | 1711 |
| Tat | EHWSYCDLRPG | 1712 |
| Pep-1N | KETWWETWWTEW | 1713 |
| Pep27 | MRKEFHNVLSSGQLLADKRPARDYNRK | 1714 |
| HABP35 | LKQKIKHVVKLKVVVKLRSQLVKRKQN | 1715 |
| HABP42 (all D) | STMMSRSHKTRSHHV | 1716 |
| HABP52 | GAHWQFNALTVRGGGS | 1717 |
| Hi3/17 | KQRTSIRATEGCLPS | 1718 |
| α-E. coli peptide | QEKIRVRLSA | 1719 |
| Salivary Receptor | QLKTADLPAGRDETTSFVLV* | 1720 |
| Adhesion Fragment | | |
| S1 (Sushi frag.) | GFKLKGMARISCLPNGQWSNFPPKCIRECAMVSS | 1721 |
| (LPS binding) | | |
| S3 (Sushi frag.) | HAEHKVKIGVEQKYGQFPQGTEVTYTCSGNYFLM | 1722 |
| (LPS binding) | | |
| MArg.1 | AMDMYSIEDRYFGGYAPEVG | 1723 |
| (Mycoplasma infected | | |
| cell line binding | | |
| peptide | | |
| BPI fragment 1 | ASQQGTAALQKELKRIKPDYSDSFKIKH | 1724 |
| (LPS binding) | | |
| 6,376,462 | | |
| BPI fragment 2 | SSQISMVPNVGLKFSISNANIKISGKWKAQKRFLK | 1725 |
| (LPS binding) | | |
| 6,376,462 | | |
| BPI fragment 3 | VHVHISKSKVGWLIQLFHKKIESALRNK | 1726 |
| (LPS binding) | | |
| 6,376,462 | | |
| LBP fragment 1 | AAQEGLLALQSELLRITLPDFTGDLRIPH | 1727 |
| (LPS binding) | | |
| 6,376,462 | | |
| LBP fragment 2 | HSALRPVPGQGLSLSISDSSIRVQGRWKVRKSFFK | 1728 |
| (LPS binding) | | |
| 6,376,462 | | |
| LBP fragment 3 | VEVDMSGDLGWLLNLFHNQIESKFQKV | 1729 |
| (LPS binding) | | |
| 6,376,462 | | |
| B. anthracis spore | ATYPLPIR | 1730 |
| binding | | |
| (WO/1999/036081) | | |
| Bacillus spore binding | peptides of 5-12 amino acids containing the sequence | 1731 |
| (WO/1999/036081) | Asn-His-Phe-Leu | |
| | peptides of 5-12 amino acids containing the sequence | 1732 |
| | Asn-His-Phe-Leu-Pro | |
| | Thr-Ser-Glu-Asn-Val-Arg-Thr (TSQNVRT) | 1733 |
| | A peptide of formula Thr-Tyr-Pro-X-Pro-X-Arg | 1734 |
| | (TYPXPXR) where X is a Ile, Val or Leu. | |
| | A peptide having the sequence TSQNVRT. | 1735 |
| | A peptide having the sequence TYPLPIR | 1736 |
| LPS binding peptide 1 | TFRRLKWK | 1737 |
| (6,384,188) | | |
| LPS BP 2 (6,384,188) | RWKVRKSFFKLQ | 1738 |
| LPS BP 3 (6,384,188) | KWKAQKRFLKMS | 1739 |
| Pseudomonas pilin | KCTSDQDEQFIPKGCSK | 1740 |
| binding peptide | | |
| (5,494,672) | | |
| RNAII inhibiting | YSPWTNF | 1741 |
| peptide (S. Aureus) | | |

Patents and patent publications disclosing the referenced antibodies are identified in the table.

[0157] In certain embodiments the targeting moieties can comprise other entities, particularly when utilized with an antimicrobial peptide as described, for example, in Table 4. Illustrative targeting moieties can include a polypeptide, a peptide, a small molecule, a ligand, a receptor, an antibody, a protein, or portions thereof that specifically interact with a target microbial organism, e.g., the cell surface appendages such as flagella and pili, and surface exposed proteins, lipids and polysaccharides of a target microbial organism.

[0158] ii. Targeting Antibodies.

[0159] In certain embodiments the targeting moieties can comprise one or more antibodies that bind specifically or preferentially a microorganism or group of microorganisms (e.g., bacteria, fungi, yeasts, protozoa, viruses, algae, etc.). The antibodies are selected to bind an epitope characteristic or the particular target microorganism(s). In various embodiments such epitopes or antigens are typically is gram-positive or gram-negative specific, or genus-specific, or species-specific, or strain specific and located on the surface of a target microbial organism. The antibody that binds the epitope or antigen can direct an anti-microbial peptide moiety or other effector to the site. Furthermore, in certain embodiments the antibody itself can provide anti-microbial activity in addition to the activity provided by effector moiety since the antibody may engage an immune system effector (e.g., a T-cell) and thereby elicit an antibody-associated immune response, e.g., a humoral immune response.

[0160] Antibodies that bind particular target microorganisms can be made using any methods readily available to one skilled in the art. For example, as described in U.S. Pat. No. 6,231,857 (incorporated herein by reference) three monoclonal antibodies, i.e., SWLA1, SWLA2, and SWLA3 have been made against S. mutans. Monoclonal antibodies obtained from non-human animals to be used in a targeting moiety can also be humanized by any means available in the art to decrease their immunogenicity and increase their ability to elicit anti-microbial immune response of a human. Illustrative microorganisms and/or targets to which antibodies may be directed are shown, for example, in Tables 3 and 11.

[0161] Various forms of antibody include, without limitation, whole antibodies, antibody fragments (e.g., (Fab′)₂ Fab′, etc.), single chain antibodies (e.g., scFv), minibodies, Di-miniantibody, Tetra-miniantibody, (scFv)₂, Diabody, scDiabody, Triabody, Tetrabody, Tandem diabody, VHH, nanobodies, affibodies, unibodies, and the like.

[0162] Methods of making such antibodies are well known to those of skill in the art. In various embodiments, such methods typically involve providing the microorganism, or a component thereof for use as an antigen to raise an immune response in an organism or for use in a screening protocol (e.g., phage or yeast display).

[0163] For example, polyclonal antibodies are typically raised by one or more injections (e.g. subcutaneous or intramuscular injections) of the target microorganism(s) or components thereof into a suitable non-human mammal (e.g., mouse, rabbit, rat, etc.).

[0164] If desired, the immunizing microorganism or antigen derived therefrom can be administered with or coupled to a carrier protein by conjugation using techniques that are well-known in the art. Such commonly used carriers which are chemically coupled to the peptide include keyhole limpet hemocyanin (KLH), thyroglobulin, bovine serum albumin (BSA), and tetanus toxoid. The coupled peptide is then used to immunize the animal (e.g. a mouse or a rabbit).

[0165] The antibodies are then obtained from blood samples taken from the mammal. The techniques used to develop polyclonal antibodies are known in the art (see, e.g., Methods of Enzymology, “Production of Antisera With Small Doses of Immunogen: Multiple Intradermal Injections”, Langone, et al. eds. (Acad. Press, 1981)). Polyclonal antibodies produced by the animals can be further purified, for example, by binding to and elution from a matrix to which the peptide to which the antibodies were raised is bound. Those of skill in the art will know of various techniques common in the immunology arts for purification and/or concentration of polyclonal antibodies, as well as monoclonal antibodies see, for example, Coligan, et al. (1991) Unit 9, Current Protocols in Immunology, Wiley Interscience).

[0166] In certain embodiments the antibodies produced will be monoclonal antibodies (“mAb's”). The general method used for production of hybridomas secreting mAbs is well known (Kohler and Milstein (1975) Nature, 256:495

[0167] Antibody fragments, e.g. single chain antibodies (scFv or others), can also be produced/selected using phage display and/or yeast display technology. The ability to express antibody fragments on the surface of viruses that infect bacteria (bacteriophage or phage) or yeasts makes it possible to isolate a single binding antibody fragment, e.g., from a library of greater than 10¹⁰ nonbinding clones. To express antibody fragments on the surface of phage (phage display) or yeast, an antibody fragment gene is inserted into the gene encoding a phage surface protein (e.g., pIII) and the antibody fragment-pIII fusion protein is displayed on the phage surface (McCafferty et al. (1990) Nature, 348: 552-554; Hoogenboom et al. (1991) Nucleic Acids Res. 19: 4133-4137).

[0168] Since the antibody fragments on the surface of the phage or yeast are functional, phage bearing antigen binding antibody fragments can be separated from non-binding phage by antigen affinity chromatography (McCafferty et al. (1990) Nature, 348: 552-554). Depending on the affinity of the antibody fragment, enrichment factors of 20 fold -1,000,000 fold are obtained for a single round of affinity selection.

[0169] Human antibodies can be produced without prior immunization by displaying very large and diverse V-gene repertoires on phage (Marks et al. (1991) J. Mol. Biol. 222: 581-597.

[0170] In certain embodiments, nanobodies can be used as targeting moieties. Methods of making VₕH (nanobodies) are also well known to those of skill in the art. The Camelidae heavy chain antibodies are found as homodimers of a single heavy chain, dimerized via their constant regions. The variable domains of these camelidae heavy chain antibodies are referred to as V_{HH} domains or V_{HH}, and can be either used per se as nanobodies and/or as a starting point for obtaining nanobodies. Isolated V_{HH} retain the ability to bind antigen with high specificity (see, e.g., Hamers-Casterman et al. (1993) Nature 363: 446-448). In certain embodiments such V_{HH} domains, or nucleotide sequences encoding them, can be derived from antibodies raised in Camelidae species, for example in camel, dromedary, llama, alpaca and guanaco. Other species besides Camelidae (e.g. shark, pufferfish) can produce functional antigen-binding heavy chain antibodies, from which (nucleotide sequences encoding) such naturally occurring V_{HH} can be obtained, e.g. using the methods described in U.S. Patent Publication US 2006/0211088.

[0171] In various embodiments, for use in therapy, human proteins are preferred, primarily because they are not as likely to provoke an immune response when administered to a patient. Comparisons of camelid V_{HH} with the V_{H} domains of human antibodies reveals several key differences in the framework regions of the camelid V_{HH} domain corresponding to the V_{H}/V_{L} interface of the human V_{H} domains. Mutation of these human residues to V_{HH} resembling residues has been performed to produce “camelized” human V_{H} domains that retain antigen binding activity, yet have improved expression and solubility.

[0172] Libraries of single V_{H} domains have also been derived for example from V_{H} genes amplified from genomic DNA or from mRNA from the spleens of immunized mice and expressed in E. coli (Ward et al. (1989) Nature 341: 544-546) and similar approaches can be performed using the V_{H} domains and/or the V_{L} domains described herein. The isolated single VH domains are called “dAbs” or domain antibodies. A “dAb” is an antibody single variable domain (V_{H} or V_{L}) polypeptide that specifically binds antigen. A “dAb” binds antigen independently of other V domains; however, as the term is used herein, a “dAb” can be present in a homo- or heteromultimer with other V_{H} or V_{L} domains where the other domains are not required for antigen binding by the dAb, i.e., where the dAb binds antigen independently of the additional V_{H} or V_{L} domains.

[0173] As described in U.S. Patent Publication US 2006/0211088 methods are known for the cloning and direct screening of immunoglobulin sequences (including but not limited to multivalent polypeptides comprising: two or more variable domains—or antigen binding domains—and in particular V_{H} domains or V_{HH} domains; fragments of V_{L}, V_{H} or V_{HH} domains, such as CDR regions, for example CDR3 regions; antigen-binding fragments of conventional 4-chain antibodies such as Fab fragments and scFv's, heavy chain antibodies and domain antibodies; and in particular of V_{H} sequences, and more in particular of V_{HH} sequences) that can be used as part of and/or to construct such nanobodies.

[0174] Methods and procedures for the production of VHH/nanobodies can also be found for example in WO 94/04678, WO 96/34103, WO 97/49805, WO 97/49805 WO 94/25591, WO 00/43507 WO 01/90190, WO 03/025020, WO 04/062551, WO 04/041863, WO 04/041865, WO 04/041862, WO 04/041867, PCT/BE2004/000159, Hamers-Casterman et al. (1993) Nature 363: 446; Riechmann and Muyldermans (1999) J. Immunological Meth., 231: 25-38; Vu et al. (1997) Molecular Immunology, 34(16-17): 1121-1131; Nguyen et al. (2000) EMBO J., 19(5): 921-930; Arbabi Ghahroudi et al. (19997) FEBS Letters 414: 521-526; van der Linden et al. (2000) J. Immunological Meth., 240: 185-195; Muyldermans (2001) Rev. Molecular Biotechnology 74: 277-302; Nguyen et al. (2001) Adv. Immunol. 79: 261, and the like.

[0175] In certain embodiments the antibody targeting moiety is a unibody. Unibodies provide an antibody technology that produces a stable, smaller antibody format with an anticipated longer therapeutic window than certain small antibody formats. In certain embodiments unibodies are produced from IgG4 antibodies by eliminating the hinge region of the antibody. Unlike the full size IgG4 antibody, the half molecule fragment is very stable and is termed a uniBody. Halving the IgG4 molecule left only one area on the UniBody that can bind to a target. Methods of producing unibodies are described in detail in PCT Publication WO2007/059782, which is incorporated herein by reference in its entirety (see, also, Kolfschoten et al. (2007) Science 317: 1554-1557).

[0176] Affibody molecules are class of affinity proteins based on a 58-amino acid residue protein domain, derived from one of the IgG-binding domains of staphylococcal protein A. This three helix bundle domain has been used as a scaffold for the construction of combinatorial phagemid libraries, from which Affibody variants that target the desired molecules can be selected using phage display technology (see, e.g,. Nord et al. (1997) Nat. Biotechnol. 15: 772-777; Ronmark et al. (2002) Eur. J. Biochem., 269: 2647-2655.). Details of Affibodies and methods of production are known to those of skill (see, e.g., U.S. Pat. No 5,831,012 which is incorporated herein by reference in its entirety).

[0177] It will also be recognized that antibodies can be prepared by any of a number of commercial services (e.g., Berkeley antibody laboratories, Bethyl Laboratories, Anawa, Eurogenetec, etc.).

[0178] Illustrative antibodies that bind various microorganisms are shown in Table 11.

TABLE 11
Illustrative antibodies that bind target microorganisms.

| Source | Antibody |
|---|---|
| U.S. Pat. No. 7,195,763 | Polyclonal/monoclonal binds specific |
| | Gram(+) cell wall repeats |
| U.S. Pat. No. 6,939,543 | Antibodies against G(+) LTA |
| U.S. Pat. No. 7,169,903 | Antibodies against G(+) peptidoglycan |
| U.S. Pat. No. 6,231,857 | Antibody against S. mutans (Shi) |
| U.S. Pat. No. 5,484,591 | Gram(−) binding antibodies |
| US 2007/0231321 | Diabody binding to Streptococcus |
| | surface antigen I/II |
| US 2003/0124635 | Antibody against S. mutans |
| US 2006/0127372 | Antibodies to Actinomyces naeslundii, |
| | Lactobacillus casei |
| US 2003/0092086 | Antibody to S. sobrinus |
| U.S. Pat. No. 7,364,738 | Monoclonal antibodies to the ClfA protein |
| | in S. aureus |
| U.S. Pat. No. 7,632,502 | Antibodies against C. albicans |
| U.S. Pat. No. 7,608,265 | Monoclonal against C. difficile |
| U.S. Pat. No. 4,777,136 | Monoclonal Antibodies against |
| | Pseudomonas aeruginosa |
| see, e.g., ab20429, ab20560, | Antibody against S. pneumoniae |
| ab79522, ab35165, ab65602 | |
| from AbCAMm Cambridge | |
| Science Park, U.K. | |

[0179] In addition, antibodies (targeting moieties) that bind other microorganisms can readily be produced using, for example, the methods described above.

[0180] iii. Porphyrins.

[0181] In certain embodiments porphyrins, or other photosensitizing agents, can be used as targeting moieties in the constructs described herein. In particular, metalloporphyrins, particularly a number of non-iron metalloporphyrins mimic heme in their molecular structure and are actively accumulated by bacteria via high affinity heme-uptake systems. The same uptake systems can be used to deliver antibiotic-porphyrin and antibacterial-porphyrin conjugates. Illustrative targeting porphyrins suitable for this purpose are described in U.S. Pat. No. 6,066,628 and shown herein, for example, in FIGS. 1 and 2.

[0182] For example, certain artificial (non-iron) metalloporphyrins (MPs) (Ga-IX, Mn-IX,) are active against Gram-negative and Gram-positive bacteria and acid-fast bacilli (e.g., Y. enterocolitica, N. meningitides, S. marcescens, E. coli, P. mirabills, K. pneumoniae, K. oxytoca, Ps. aeruginosa, C. freundii, E. aerogenes, F. menigosepticum, S. aureus, B. subtilis, S. pyogenes A, E. faecalis, M smegmatis, M bovis, M tuber., S. crevisiae) as described in Tables 1-5 of U.S. Pat. No. 6,066,628. These MPs can be used as targeting moieties against these microorganisms.

[0183] Similarly, some MPs are also growth-inhibitory against yeasts, indicating their usefulness targeting moieties to target Candida species (e.g., Candida albicans, C. krusei, C. pillosus, C. glabrata, etc.) and other mycoses including but not limited to those caused by as Trichophyton, Epidermophyton, Histoplasma, Aspergillus, Cryptococcus, and the like.

[0184] Porphyrins, and other photosensitizers, also have antimicrobial activity. Accordingly, in certain embodiments, the porphyrins, or other photosensitizers, can be used as effectors (e.g., attached to targeting peptides as described herein). In various embodiments the porphyrins or other photosensitizers can provide a dual functionality, e.g., as a targeting moiety and an antimicrobial and can be attached to a targeting peptide and/or to an antimicrobial peptide as described herein.

[0185] Illustrative porphyrins and other photosensitizers are shown in FIGS. 1-11 and described in more detail in the discussion of effectors below.

[0186] iv. Pheromones.

[0187] In certain embodiments, pheromones from microorganisms can be used as targeting moieties. Illustrative pheromones from bacteria and fungi are shown in Table 12.

TABLE 12
Illustrative bacterial and fungal pheromones utilizable as targeting moieties.

| Bacterial Pheromones | | | |
|---|---|---|---|
| Locus tag | Product | Sequence | SEQ ID |
| gi\|1041118\|dbj\|BAA11198.1\| | iPD1 [Enterococcus | MKQQKKHIAALLF | 1742 |
| | faecalis] | ALILTLVS | |
| gi\|1113947\|gb\|AAB35253.1\| | iAM373sex pheromone | SIFTLVA | 1743 |
| | inhibito [Enterococcus | | |
| | faecalis, Peptide, 7 aa] | | |
| gi\|115412\|sp\|P13268.1\|CAD1_ENTFA | Sex pheromone CAD1 | LFSLVLAG | 1744 |
| gi\|116406\|sp\|P11932.1\|CIA_ENTFA | Sex pheromone cAM373 | AIFILAS | 1745 |
| | (Clumping-inducing | | |
| | agent) (CIA) | | |
| gi\|117240\|sp\|P13269.1\|CPD1_ENTFA | Sex pheromone cPD1 | FLVMFLSG | 1746 |
| gi\|12056953\|gb\|AAG48144.1\|AF322594_1 | putative peptide | DSIRDVSPTFNKIRR | 1747 |
| | pheromone PrcA | WFDGLFK | |
| | [Lactobacillus paracasei] | | |
| gi\|123988\|sp\|P24803.1\|IAD1_ENTFA | Sex pheromone inhibitor | MSKRAMKKIIPLIT | 1748 |
| | determinant precursor | LFVVTLVG | |
| | (iAD1) | | |
| gi\|126362994\|emb\|CAM35812.1\| | precursor of pheromone | KDEIYWKPS | 1749 |
| | peptide ComX [Bacillus | | |
| | amyloliquefaciens FZB42] | | |
| gi\|1587088\|prf\|\|2205353A | pheromone | YSTCDFIM | 1750 |
| gi\|15900442\|ref\|NP_345046.1\| | peptide pheromone BlpC | GLWEDLLYNINRY | 1751 |
| | [Streptococcus | AHYIT | |
| | pneumoniae TIGR4] | | |
| gi\|1617436\|emb\|CAA66791.1\| | competence pheromone | DIRHRINNSIWRDIF | 1752 |
| | [Streptococcus gordonii] | LKRK | |
| gi\|1617440\|emb\|CAA66786.1\| | competence pheromone | DVRSNKIRLWWEN | 1753 |
| | [Streptococcus gordonii] | IFFNKK | |
| gi\|18307870\|gb\|AAL67728.1\|AF456134_2 | ComX pheromone | PTTREWDG | 1754 |
| | precursor [Bacillus | | |
| | mojavensis] | | |
| gi\|18307874\|gb\|AAL67731.1\|AF456135_2 | ComX pheromone | LQIYTNGNWVPS | 1755 |
| | precursor [Bacillus | | |
| | mojavensis] | | |
| gi\|29377808\|ref\|NP_816936.1\| | sex pheromone inhibitor | MSKRAMKKIIPLIT | 1756 |
| | determinant [Enterococcus | LFVVTLVG | |
| | faecalis V583] | | |
| gi\|3342125\|gb\|AAC27522.1\| | putative pheromone | GAGKNLIYGMGYG | 1757 |
| | [Enterococcus faecium] | YLRSCNRL | |
| gi\|41018893\|sp\|P60242.1\|CSP1_STRPN | Competence-stimulating | EMRLSKFFRDFILQ | 1758 |
| | peptide type 1 precursor | RKK | |
| | (CSP-1) | | |
| gi\|57489126\|gb\|AAW51333.1\| | PcfP [Enterococcus | WSEIEINTKQSN | 1759 |
| | faecalis] | | |
| gi\|57489152\|gb\|AAW51349.1\| | PrgT [Enterococcus | HISKERFEAY | 1760 |
| | faecalis] | | |
| gi\|58616083\|ref\|YP_195761.1\| | UvaF [Enterococcus | KYKCSWCKRVYTL | 1761 |
| | faecalis] | RKDHRTAR | |
| gi\|58616111\|ref\|YP_195802.1\| | PcfP [Enterococcus | WSEIEINTKQSN | 1762 |
| | faecalis] | | |
| gi\|58616132\|ref\|YP_195769.1\| | PrgQ [Enterococcus | MKTTLKKLSRYIA | 1763 |
| | faecalis] | VVIAITLIFI | |
| gi\|58616137\|ref\|YP_195772.1\| | PrgT [Enterococcus | HISKERFEAY | 1764 |
| | faecalis] | | |
| gi\|6919848\|sp\|O33689.1\|CSP_STROR | Competence-stimulating | DKRLPYFFKHLFSN | 1765 |
| | peptide precursor (CSP) | RTK | |
| gi\|6919849\|sp\|O33666.1\|CSP2_STRMT | Competence-stimulating | EMRKPDGALFNLF | 1766 |
| | peptide precursor (CSP) | RRR | |
| gi\|6919850\|sp\|O33668.1\|CSP3_STRMT | Competence-stimulating | EMRKSNNNFFHFL | 1767 |
| | peptide precursor (CSP) | RRI | |
| gi\|6919851\|sp\|O33672.1\|CSP1_STRMT | Competence-stimulating | ESRLPKIRFDFIFPR | 1768 |
| | peptide precursor (CSP) | KK | |
| gi\|6919852\|sp\|O33675.1\|CSP4_STRMT | Competence-stimulating | EIRQTHNIFFNFFKRR | 1769 |
| | peptide precursor (CSP) | | |
| gi\|6919853\|sp\|O33690.1\|CSP2_STROR | Competence-stimulating | DWRISETIRNLIFPR | 1770 |
| | peptide precursor (CSP) | RK | |
| gi\|999344\|gb\|AAB34501.1\| | cOB1bacterial sex | VAVLVLGA | 1771 |
| | pheromone [Enterococcus | | |
| | faecalis, Peptide, 8 aa] | | |
| gi\|18307878\|gb\|AAL67734.1\|AF456136_2 | ComX pheromone | FFEDDKRKSFI | 1772 |
| | precursor [Bacillus | | |
| | subtilis] | | |
| gi\|18307882\|gb\|AAL67737.1\|AF456137_2 | ComX pheromone | FFEDDKRKSFI | 1773 |
| | precursor [Bacillus | | |
| | subtilis] | | |
| gi\|28272731\|emb\|CAD65660.1\| | accessory gene regulator | MKQKMYEAIAHLF | 1774 |
| | protein D, peptide | KYVGAKQLVMCC | |
| | pheromone precursor | VGIWFETKIPDELRK | |
| | [Lactobacillus plantarum | | |
| | WCFS1] | | |
| gi\|28379890\|ref\|NP_786782.1\| | accessory gene regulator | MKQKMYEAIAHLF | 1775 |
| | protein D, peptide | KYVGAKQLVMCC | |
| | pheromone precursor | VGIWFETKIPDELRK | |
| | [Lactobacillus plantarum | | |
| | WCFS1] | | |
| gi\|57489105\|gb\|AAW51312.1\| | PrgF [Enterococcus | VVAYVITQVGAIRF | 1776 |
| | faecalis] | | |
| gi\|58616090\|ref\|YP_195779.1\| | PrgF [Enterococcus | VVAYVITQVGAIRF | 1777 |
| | faecalis] | | |
| gi\|58616138\|ref\|YP_195762.1\| | PrgN [Enterococcus | LLKLQDDYLLHLE | 1778 |
| | faecalis] | RHRRTKKIIDEN | |
| gi\|57489117\|gb\|AAW51324.1\| | PcfF [Enterococcus | EDIKDLTDKVQSLN | 1779 |
| | faecalis] | ALVQSELNKLIKRK | |
| | | DQS | |
| gi\|57489119\|gb\|AAW51326.1\| | PcfH [Enterococcus | WFLDFSDWLSKVP | 1780 |
| | faecalis] | SKLWAE | |
| gi\|58616102\|ref\|YP_195792.1\| | PcfF [Enterococcus | EDIKDLTDKVQSLN | 1781 |
| | faecalis] | ALVQSELNKLIKRK | |
| | | DQS | |
| gi\|58616104\|ref\|YP_195794.1\| | PcfH [Enterococcus | WFLDFSDWLSKVP | 1782 |
| | faecalis] | SKLWAE | |
| Fungi | | | |
| gi\|1127585\|gb\|AAA99765.1\| | mfa1 gene product | MLSIFAQTTQTSAS | 1783 |
| | | EPQQSPTAPQGRDN | |
| | | GSPIGYSSCVVA | |
| gi\|1127592\|gb\|AAA99771.1\| | mfa2 gene product | MLSIFETVAAAAPV | 1784 |
| | | TVAETQQASNNEN | |
| | | RGQPGYYCLIA | |
| gi\|11907715\|gb\|AAG41298.1\| | pheromone precursor | PSLPSSPPSLLPPLPL | 1785 |
| | MFalpha1D | LKLLATRRPTLVG | |
| | [Cryptococcus neoformans | MTLCV | |
| | var. neoformans] | | |
| gi\|13810235\|emb\|CAC37424.1\| | M-factor precursor Mfm1 | MDSMANSVSSSSV | 1786 |
| | [Schizosaccharomyces | VNAGNKPAETLNK | |
| | pombe] | TVKNYTPKVPYMC | |
| | | VIA | |
| gi\|14269436\|gb\|AAK58071.1\|AF378295_1 | peptide mating pheromone | MDTFTYVDLAAVA | 1787 |
| | precursor Bbp2-3 | AAAVADEVPRDFE | |
| | [Schizophyllum | DQITDYQSYCIIC | |
| | commune] | | |
| gi\|14269440\|gb\|AAK58073.1\|AF378297_1 | peptide mating pheromone | SNVHGWCVVA | 1788 |
| | precursor Bbp2-1 | | |
| | [Schizophyllum | | |
| | commune] | | |
| gi\|1813600\|gb\|AAB41859.1\| | pheromone precursor | NTTAHGWCVVA | 1789 |
| | Bbp1(1) [Schizophyllum | | |
| | commune] | | |
| gi\|24940428\|emb\|CAD56313.1\| | a-pheromone | MQPSTVTAAPKDK | 1790 |
| | [Saccharomyces | TSAEKKDNYIIKGV | |
| | paradoxus] | FWDPACVIA | |
| gi\|27549492\|gb\|AAO17258.1\| | pheromone phb3.1 | GPTWWCVNA | 1791 |
| | [Coprinopsis cinerea] | | |
| gi\|27549494\|gb\|AAO17259.1\| | pheromone phb3.2 | SGPTWFCIIQ | 1792 |
| | [Coprinopsis cinerea] | | |
| gi\|27752314\|gb\|AAO19469.1\| | pheromone protein a | FTAIFSTLSSSVASK | 1793 |
| | pecursor [Cryptococcus | TDAPRNEEAYSSG | |
| | neoformans var. grubii] | NSP | |
| gi\|2865510\|gb\|AAC02682.1\| | MAT-1 pheromone | MFSIFAQPAQTSVS | 1794 |
| | [Ustilago hordei] | ETQESPANHGANP | |
| | | GKSGSGLGYSTCV | |
| | | VA | |
| gi\|3023372\|sp\|P78742.1\|BB11_SCHCO | RecName: Full = Mating- | NTTAHGWCVVA | 1795 |
| | type pheromone BBP1(1); | | |
| | Flags: Precursor | | |
| gi\|3025079\|sp\|P56508.1\|SNA2_YEAST | RecName: Full = Protein | SDDNYGSLA | 1796 |
| | SNA2 | | |
| gi\|37626077\|gb\|AAQ96360.1\| | pheromone precursor Phb3 | NGLTFWCVIA | 1797 |
| | B5 [Coprinopsis cinerea] | | |
| gi\|37626081\|gb\|AAQ96362.1\| | pheromone precursor | PSWFCVIA | 1798 |
| | Phb3.2 B45 [Coprinopsis | | |
| | cinerea] | | |
| gi\|37626083\|gb\|AAQ96363.1\| | pheromone precursor | ASWFCTIA | 1799 |
| | Phb3.1 B47 [Coprinopsis | | |
| | cinerea] | | |
| gi\|37961432\|gb\|AAP57503.1\| | Ste3-like pheromone | PHHKIANASDKRR | 1800 |
| | receptor [Thanatephorus | RMYFEIFMCAVL | |
| | cucumeris] | | |
| gi\|400250\|sp\|P31962.1\|MFA1_USTMA | RecName: Full = A1- | MLSIFAQTTQTSAS | 1801 |
| | specific pheromone; | EPQQSPTAPQGRDN | |
| | AltName: Full = Mating | GSPIGYSSCVVA | |
| | factor A1 | | |
| gi\|400251\|sp\|P31963.1\|MFA2_USTMA | RecName: Full = A2- | MLSIFETVAAAAPV | 1802 |
| | specific pheromone; | TVAETQQASNNEN | |
| | AltName: Full = Mating | RGQPGYYCLIA | |
| | factor A2 | | |
| gi\|41209131\|gb\|AAR99617.1\| | lipopeptide mating | SLTYAWCVVA | 1803 |
| | pheromone precursor | | |
| | Bap2(3) [Schizophyllum | | |
| | commune] | | |
| gi\|41209146\|gb\|AAR99650.1\| | lipopeptide mating | TSMAHAWCVVA | 1804 |
| | pheromone precursor | | |
| | Bap3(2) [Schizophyllum | | |
| | commune] | | |
| gi\|41209149\|gb\|AAR99653.1\| | lipopeptide mating | GYCVVA | 1805 |
| | pheromone precursor | | |
| | Bbp2(8) [Schizophyllum | | |
| | commune] | | |
| gi\|46098187\|gb\|EAK83420.1\| | MFA1_USTMA A1- | MLSIFAQTTQTSAS | 1806 |
| | SPECIFIC PHEROMONE | EPQQSPTAPQGRDN | |
| | (MATING FACTOR A1) | GSPIGYSSCVVA | |
| | [Ustilago maydis 521] | | |
| gi\|546861\|gb\|AAB30833.1\| | M-factor mating | MDSMANTVSSSVV | 1807 |
| | pheromone | NTGNKPSETLNKT | |
| | [Schizosaccharomyces | VKNYTPKVPYMCV | |
| | pombe] | IA | |
| gi\|5917793\|gb\|AAD56043.1\|AF184069_1 | pheromone Mfa2 | MFSLFETVAAAVK | 1808 |
| | [Ustilago hordei] | VVSAAEPEHAPTNE | |
| | | GKGEPAPYCIIA | |
| gi\|6014618\|gb\|AAF01424.1\|AF186389_1 | Phb3.2.42 [Coprinus | LTWFCVIA | 1809 |
| | cinereus] | | |
| gi\|68266363\|gb\|AAY88882.1\| | putative pheromone | LREKRRRRWFEAF | 1810 |
| | receptor STE3.4 | MGFGL | |
| | [Coprinellus disseminatus] | | |
| gi\|71012805\|ref\|XP_758529.1\| | A1-specific pheromone | MLSIFAQTTQTSAS | 1811 |
| | [Ustilago maydis 521] | EPQQSPTAPQGRDN | |
| | | GSPIGYSSCVVA | |
| gi\|72414834\|emb\|CAI59748.1\| | mating factor a1.3 | MDALTLFAPVSLG | 1812 |
| | [Sporisorium reilianum] | AVATEQAPVDEER | |
| | | PNRQTFPWIGCVVA | |
| gi\|72414854\|emb\|CAI59758.1\| | mating factor a2.1 | MFIFESVVASVQAV | 1813 |
| | [Sporisorium reilianum] | SVAEQDQTPVSEG | |
| | | RGKPAVYCTIA | |
| gi\|1127587\|gb\|AAA99767.1\| | rba1 gene product | PWMSLLFSFLALLA | 1814 |
| | | LILPKLSKDDPLGL | |
| | | TRQPR | |
| gi\|151941959\|gb\|EDN60315.1\| | pheromone-regulated | ASISLIMEGSANIEA | 1815 |
| | membrane protein | VGKLVWLAAALPL | |
| | [Saccharomyces cerevisiae | AFI | |
| | YJM789] | | |
| gi\|3025095\|sp\|Q07549.1\|SNA4_YEAST | Protein SNA4 | ARNVYPSVETPLLQ | 1816 |
| | | GAAPHDNKQSLVE | |
| | | SPPPYVP | |
| gi\|73921293\|sp\|Q08245.3\|ZEO1_YEAST | RecName: Full = Protein | FLKKLNRKIASIFN | 1817 |
| | ZEO1; AltName: | | |
| | Full = Zeocin resistance | | |
| | protein 1 | | |
| gi\|74644573\|sp\|Q9P305.3\|IGO2_YEAST | RecName: Full = Protein | DSISRQGSISSGPPP | 1818 |
| EDF (E. coli) | IGO2 | RSPNK | |
| | | NNWNN | 1819 |

[0188] v. Targeting Enhancers/Opsonins

[0189] In certain embodiments compositions are contemplated that incorporate a targeting enhancer (e.g., an opsonin) along with one or more targeting moieties (e.g., targeting peptides). Targeting enhancers include moieties that increase binding affinity, and/or binding specificity, and/or internalization of a moiety by the target cell/microorganism.

[0190] Accordingly, in certain embodiments, a targeting moiety and/or a targeted antimicrobial molecule comprise a peptide, with the desired level of binding specificity and/or avidity, attached (e.g., conjugated) to an opsonin. When bound to a target cell through the targeting peptide, the opsonin component encourages phagocytosis and destruction by resident macrophages, dendritic cells, monocytes, or PMNs. Opsonins contemplated for conjugation can be of a direct or indirect type.

[0191] Direct opsonins include, fore example, any bacterial surface antigen, PAMP (pathogen-associated molecular pattern), or other molecule recognized by host PRRs (pathogen recognizing receptors). Opsonins can include, but are not limited to, bacterial protein, lipid, nucleic acid, charbohydrate and/or oligosaccharide moieties.

[0192] In certain embodiments opsonins include, but are not limited to, N-acetyl-D-glucosamine (GlcNAc), N-acetyl-D-galactosamine (GlaNAc), N-acetylglucosamine-containing muramyl peptides, NAG-muramyl peptides, NAG-NAM, peptidoglycan, teichoic acid, lipoteichoic acid, LPS, o-antigen, mannose, fucose, ManNAc, galactose, maltose, glucose, glucosamine, sucrose, mannosamine, galactose-alpha-1,3-galactosyl-beta-1,4-N-acetyl glucosamine, or alpha-1,3-gal-gal, or other sugars.

[0193] In certain embodiments, opsonins include indirect opsonins. Indirect opsonins function through binding to a direct opsonin already present. For example an Fc portion of an antibody, a sugar-binding lectin protein (example MBL), or host complement factors (example C3b, C4b, iC3b).

[0194] In certain embodiments the opsonin is to galactose-alpha-1,3-galactosyl-beta-1,4-N-acetyl glucosamine, or alpha1,3-gal-gal.

[0195] Other examples of opsonin molecules include, but are not limited to antibodies (e.g., IgG and IgA), components of the complement system (e.g., C3b, C4b, and iC3b), mannose-binding lectin (MBL) (initiates the formation of C3b), and the like.

[0196] Methods of coupling an opsonin to a targeting moiety are well known to those of skill in the art (see, e.g., discussion below regarding attachment of effectors to targeting moieties).

[0197] B) Effectors.

[0198] Any of a wide number of effectors can be coupled to targeting moieties as described herein to preferentially deliver the effector to a target organism and/or tissue. Illustrative effectors include, but are not limited to detectable labels, small molecule antibiotics, antimicrobial peptides, porphyrins or other photosensitizers, epitope tags/antibodies for use in a pretargeting protocol, agents that physically disrupt the extracellular matrix within a community of microorganisms, microparticles and/or microcapsules, nanoparticles and/or nanocapsules, “carrier” vehicles including, but not limited to lipids, liposomes, dendrimers, cholic acid-based peptide mimics or other peptide mimics, steroid antibiotics, and the like.

[0199] i. Detectable labels.

[0200] In certain embodiments chimeric moieties are provided comprising a targeting moiety (e.g., as described in Table 3) attached directly or through a linker to a detectable label. Such chimeric moieties are effective for detecting the presence and/or quantity, and/or location of the microorganism(s) to which the targeting moiety is directed. Similarly these chimeric moieties are useful to identify cells and/or tissues and/or food stuffs and/or other compositions that are infected with the targeted microorganism(s).

[0201] Detectable labels suitable for use in such chimeric moieties include any composition detectable by spectroscopic, photochemical, biochemical, immunochemical, electrical, optical, or chemical means. Illustrative useful labels include, but are not limited to, biotin for staining with labeled streptavidin conjugates, avidin or streptavidin for labeling with biotin conjugates fluorescent dyes (e.g., fluorescein, texas red, rhodamine, green fluorescent protein, and the like, see, e.g., Molecular Probes, Eugene, Oreg., USA), radiolabels (e.g.,3H, ¹²⁵I, ³⁵S, ¹⁴C, ³²P, ⁹⁹Tc, ²⁰³Pb, ⁶⁷Ga, ⁶⁸Ga, ⁷²As, ¹¹¹In, ^{113m}In, ⁹⁷Ru, ⁶²Cu, 641Cu, ⁵²Fe, ^{52m}Mn, ⁵¹Cr, ¹⁸⁶Re, ¹⁸⁸Re, ⁷⁷As, ⁹⁰Y, ⁶⁷Cu, ¹⁶⁹Er, ¹²¹Sn, ¹²⁷Te, ¹⁴²Pr, ¹⁴³Pr, ¹⁹⁸Au, ¹⁹⁹Au, ¹⁶¹Tb, ¹⁰⁹Pd, ¹⁶⁵Dy, ¹⁴⁹Pm, ¹⁵¹Pm, 153Sm, ¹⁵⁷Gd, ¹⁵⁹Gd, ¹⁶⁶Ho, ¹⁷²Tm, ¹⁶⁹Yb, ¹⁷⁵Yb, ¹⁷⁷Lu, ¹⁰⁵Rh, ¹¹¹Ag, and the like), enzymes (e.g. horse radish peroxidase, alkaline phosphatase and others commonly used in an ELISA), various colorimetric labels, magnetic or paramagnetic labels (e.g., magnetic and/or paramagnetic nanoparticles), spin labels, radio-opaque labels, and the like. Patents teaching the use of such labels include, for example, U.S. Pat. Nos. 3,817,837; 3,850,752; 3,939,350; 3,996,345; 4,277,437; 4,275,149; and 4,366,241.

[0202] It will be recognized that fluorescent labels are not to be limited to single species organic molecules, but include inorganic molecules, multi-molecular mixtures of organic and/or inorganic molecules, crystals, heteropolymers, and the like. Thus, for example, CdSe-CdS core-shell nanocrystals enclosed in a silica shell can be easily derivatized for coupling to a biological molecule (Bruchez et al. (1998) Science, 281: 2013-2016). Similarly, highly fluorescent quantum dots (zinc sulfide-capped cadmium selenide) have been covalently coupled to biomolecules for use in ultrasensitive biological detection (Warren and Nie (1998) Science, 281: 2016-2018).

[0203] In various embodiments spin labels are provided by reporter molecules with an unpaired electron spin which can be detected by electron spin resonance (ESR) spectroscopy. Illustrative spin labels include organic free radicals, transitional metal complexes, particularly vanadium, copper, iron, and manganese, and the like. Exemplary spin labels include, for example, nitroxide free radicals.

[0204] Means of detecting such labels are well known to those of skill in the art. Thus, for example, where the label is a radioactive label, means for detection include a scintillation counter or photographic film as in autoradiography. Where the label is a fluorescent label, it may be detected by exciting the fluorochrome with the appropriate wavelength of light and detecting the resulting fluorescence, e.g., by microscopy, visual inspection, via photographic film, by the use of electronic detectors such as charge coupled devices (CCDs) or photomultipliers and the like. Similarly, enzymatic labels may be detected by providing appropriate substrates for the enzyme and detecting the resulting reaction product. Finally, simple colorimetric labels may be detected simply by observing the color associated with the label.

[0205] ii. Antibiotics.

[0206] In certain embodiments chimeric moieties are provided comprising a targeting moiety (e.g. as described in Table 3) attached directly or through a linker to a small molecule antibiotic and/or to a carrier (e.g., a lipid or liposome, a polymer, etc.) comprising a small molecule antibiotic. Illustrative antibiotics are shown in Table 13.

TABLE 13
Illustrative antibiotics for use in the chimeric moieties described herein.

| Class | Generic Name | BRAND NAME |
|---|---|---|
| Aminoglycosides | Amikacin | AMIKIN ® |
| | Gentamicin | GARAMYCIN ® |
| | Kanamycin | KANTREX ® |
| | Neomycin | |
| | Netilmicin | NETROMYCIN ® |
| | Streptomycin | |
| | Tobramycin | NEBCIN ® |
| | Paromomycin | HUMATIN ® |
| Carbacephem | Loracarbef | LORABID ® |
| Carbapenems | Ertapenem | INVANZ ® |
| | Doripenem | FINIBAX ® |
| | Imipenem/Cilastatin | PRIMAXIN ® |
| | Meropenem | MERREM ® |
| Cephalosporins | Cefadroxil | DURICEF ® |
| (First generation) | Cefazolin | ANCEF ® |
| | Cefalotin or Cefalothin | KEFLIN ® |
| | Cefalexin | KEFLEX ® |
| Cephalosporins | Cefaclor | CECLOR ® |
| (Second | Cefamandole | MANDOLE ® |
| generation) | Cefoxitin | MEFOXIN ® |
| | Cefprozil | CEFZIL ® |
| | Cefuroxime | CEFTIN, ZINNAT ® |
| Cephalosporins | Cefixime | SUPRAX ® |
| (Third | Cefdinir | OMNICEF ® |
| generation) | Cefditoren | SPECTRACEF ® |
| | Cefoperazone | CEFOBID ® |
| | Cefotaxime | CLAFORAN ® |
| | Cefpodoxime | |
| | Ceftazidime | FORTAZ ® |
| | Ceftibuten | CEDAX ® |
| | Ceftizoxime | |
| | Ceftriaxone | ROCEPHIN ® |
| Cephalosporins | Cefepime | MAXIPIME ® |
| (Fourth | | |
| generation) | | |
| Cephalosporins | Ceftobiprole | |
| (Fifth generation) | | |
| Glycopeptides | Teicoplanin | |
| | Vancomycin | VANCOCIN ® |
| Macrolides | | |
| Azithromycin | Zithromax | |
| Clarithromycin | Biaxin | |
| Dirithromycin | | |
| Erythromycin | Erythocin, Erythroped | |
| Roxithromycin | | |
| Troleandomycin | | |
| Telithromycin | Ketek | |
| Monobactams | | |
| | Aztreonam | |
| Penicillins | Amoxicillin | NOVAMOX ®, AMOXIL ® |
| | Ampicillin | |
| | Azlocillin | |
| | Carbenicillin | |
| | Cloxacillin | |
| | Dicloxacillin | |
| | Flucloxacillin | FLOXAPEN ® |
| | Mezlocillin | |
| | Meticillin | |
| | Nafcillin | |
| | Oxacillin | |
| | Penicillin | |
| | Piperacillin | |
| | Ticarcillin | |
| Polypeptides | Bacitracin | |
| | Colistin | |
| | Polymyxin B | |
| Quinolones | Mafenide | |
| | Prontosil (archaic) | |
| | Sulfacetamide | |
| | Sulfamethizole | |
| | Sulfanilimide (archaic) | |
| | Sulfasalazine | |
| | Sulfisoxazole | |
| | Trimethoprim | BACTRIM ® |
| | Trimethoprim- | |
| | Sulfamethoxazole (Co- | |
| | trimoxazole) | |
| | (TMP-SMX) | |
| Tetracyclines | Demeclocycline | |
| | Doxycycline | VIBRAMYCIN ® |
| | Minocycline | MINOCIN ® |
| | Oxytetracycline | TERRACIN ® |
| | Tetracycline | SUMYCIN ® |
| Natural products | Antimicrobial herbal | |
| | extracts | |
| | Essential oils | |
| | Farnesol | |
| | Licorice root extracts | |
| | Glycyrrhizol A | |
| | Glycyrrhizol B | |
| | 6,8-diisoprenyl-5,7,4′- | |
| | trihydroxyisoflavone | |
| Others | Arsphenamine | SALVARSAN ® |
| | Chloramphenicol | CHLOROMYCETIN ® |
| | Clindamycin | CLEOCIN ® |
| | Lincomycin | |
| | Ethambutol | |
| | Fosfomycin | |
| | Fusidic acid | FUCIDIN ® |
| | Furazolidone | |
| | Isoniazid | |
| | Linezolid | ZYVOX ® |
| | Metronidazole | FLAGYL ® |
| | Mupirocin | BACTROBAN ® |
| | Nitrofurantoin | MACRODANTIN ®, |
| | | MACROBID ® |
| | Platensimycin | |
| | Pyrazinamide | |
| | Quinupristin/ | SYNCERCID ® |
| | Dalfopristin | |
| | Rifampin or | |
| | Rifampicin | |
| | Tinidazole | |
| | Artemisinin | |
| Antifungals | Amphotericin B | |
| | Anidulafungin | |
| | Caspofungin acetate | |
| | Clotrimazole | |
| | Fluconazole | |
| | Flucytosine | |
| | Griseofulvin | |
| | Itraconazole | |
| | Ketoconazole | |
| | Micafungin | |
| | Miconazole | |
| | Nystatin | |
| | Pentamidine | |
| | Posaconazole | |
| | Terbinafine | |
| | Voriconazole | |
| Antimycobiotics | Aminosalicylic Acid | |
| | Capreomycin | |
| | Clofazimine | |
| | Cycloserine | |
| | Ethionamide | |
| | Rifabutin | |
| | Rifapentine | |
| Antivirals | Abacavir | |
| | Acyclovir | |
| | Adefovir | |
| | Amantadine | |
| | Atazanavir | |
| | Cidofovir | |
| | Darunavir | |
| | Didanosine | |
| | Docosanol | |
| | Efavirenz | |
| | Emtricitabine | |
| | Enfuvirtide | |
| | Entecavir | |
| | Etravirine | |
| | Famciclovir | |
| | Fomivirsen | |
| | Fosamprenavir | |
| | Foscarnet | |
| | Ganciclovir | |
| | Idoxuridine | |
| | Indinavir | |
| | Interferon alpha | |
| | Lamivudine | |
| | Lopinavir/ritonavir | |
| | Maraviroc | |
| | Nelfinavir | |
| | Nevirapine | |
| | Oseltamivir | |
| | Penciclovir | |
| | Peramivir | |
| | Raltegravir | |
| | Ribavirin | |
| | Rimantadine | |
| | Ritonavir | |
| | Saquinavir | |
| | Stavudine | |
| | Telbivudine | |
| | Tenofovir | |
| | Tipranavir | |
| | Trifluridine | |
| | Valacyclovir | |
| | Valganciclovir | |
| | Zanamivir | |
| | Zidovudine | |
| Anti-parasitics | Albendazole | |
| | Artesunate | |
| | Atovaquone | |
| | Bephenium | |
| | hydroxynaphthoate | |
| | Chloroquine | |
| | Dapsone | |
| | Diethyl-carbamazine | |
| | Diloxanide furoate | |
| | Eflornithine | |
| | Emetine HCl | |
| | Furazolidone | |
| | Ivermectin | |
| | Lindane | |
| | Mebendazole | |
| | Mefloquine | |
| | Melarsoprol | |
| | Miltefosine | |
| | Niclosamide | |
| | Nifurtimox | |
| | Nitazoxanide | |
| | Oxamniquine | |
| | Paromomycin | |
| | Permethrin | |
| | Piperazine | |
| | Praziquantel | |
| | Primaquine | |
| | Pyrantel pamoate | |
| | Pyrimethamine | |
| | Proguanil | |
| | Quinacrine HCl | |
| | Quinidine | |
| | Quinine | |
| | Sodium Stibogluconate | |
| | Spiramycin | |
| | Thiabendazole | |
| | Tinidazole | |

[0207] iii. Porphyrins and Non-Porphyrin Photosensitizers.

[0208] In certain embodiments, porphyrins and other photosensitizers can be used as targeting moieties and/or as effectors in the methods and compositions of this invention. A photosensitizer is a drug or other chemical that increases photosensitivity of the organism (e.g., bacterium, yeast, fungus, etc.). As targeting moieties the photosensitizers (e.g., porphyrins) are preferentially uptaken by the target microorganisms and thereby facilitate delivery of the chimeric moiety to the target microorganism.

[0209] As effectors, photosensitizers can be useful in photodynamic antimicrobial chemotherapy (PACT). In various embodiments PACT utilizes photosensitizers and light (e.g., visible, ultraviolet, infrared, etc.) in order to give a phototoxic response in the target organism(s), often via oxidative damage.

[0210] Currently, the major use of PACT is in the disinfection of blood products, particularly for viral inactivation, although more clinically-based protocols are used, e.g. in the treatment of oral infection or topical infection. The technique has been shown to be effective in vitro against bacteria (including drug-resistant strains), yeasts, viruses, parasites, and the like.

[0211] Attaching a targeting moiety (e.g., a targeting peptide) to the photosensitizer, e.g., as described herein, provides a means of specifically or preferentially targeting the photosensitizer(s) to particular species or strains(s) of microorganism.

[0212] A wide range of photosensitizers, both natural and synthetic are known to those of skill in the art (see, e.g., Wainwright (1998) J. Antimicrob. Chemotherap. 42: 13-28). Photosensitizers are available with differing physicochemical make-up and light-absorption properties. In various embodiments photosensitizers are usually aromatic molecules that are efficient in the formation of long-lived triplet excited states. In terms of the energy absorbed by the aromatic-system, this again depends on the molecular structure involved. For example: furocoumarin photosensitizers (psoralens) absorb relatively high energy ultraviolet (UV) light (c. 300-350 nm), whereas macrocyclic, heteroaromatic molecules such as the phthalocyanines absorb lower energy, near-infrared light.

[0213] Illustrative photosensitizers include, but are not limited to porphyrinic macrocyles (especially porphyrins, chlorines, etc., see, e.g., FIGS. 1 and 2). In particular, metalloporphyrins, particularly a number of non-iron metalloporphyrins mimic haem in their molecular structure and are actively accumulated by bacteria via high affinity haem-uptake systems. The same uptake systems can be used to deliver antibiotic-porphyrin and antibacterial-porphyrin conjugates. Illustrative targeting porphyrins suitable for this purpose are described in U.S. Pat. No. 6,066,628 and shown herein in FIGS. 1 and 2.

[0214] Illustrative examples of targeted porphyrins are described in Example 5 and associated figures and in FIG. 13.

[0215] For example, certain artificial (non-iron) metalloporphyrins (MPs) (Ga-IX, Mn-IX,) are active against Gram-negative and Gram-positive bacteria and acid-fast bacilli (e.g., Y. enterocolitica, N. meningitides, S. marcescens, E. coli, P. mirabills, K. pneumoniae, K. oxytoca, Ps. aeruginosa, C. freundii, E. aerogenes, F. menigosepticum, S. aureus, B. subtilis, S. pyogenes A, E. faecalis, M smegmatis, M bovis, M tuber., S. crevisiae) as described in Tables 1-5 of U.S. Pat. No. 6,066,628. These MPs can be used as targeting moieties against these microorganisms.

[0216] Similarly, some MPs are also growth-inhibitory against yeasts, indicating their usefulness targeting moieties to target Candida species (e.g., Candida albicans, C. krusei, C. pillosus, C. glabrata, etc.) and other mycoses including but not limited to those caused by as Trichophyton, Epidermophyton, Histoplasma, Aspergillus, Cryptococcus, and the like.

[0217] Other photosensitizers include, but are not limited to cyanines (see, e.g,. FIG. 6) and phthalocyanines (see, e.g., FIG. 4), azines (see, e.g., FIG. 5) including especially methylene blue and touidine blue, hypericin (see, e.g., FIG. 8), acridines (see, e.g., FIG. 9) including especially Rose Bengal (see, e.g., FIG. 10), crown ethers (see, e.g., FIG. 11), and the like. In certain embodiments, the photosensitizers include tin chlorin 6 and related compounds (e.g., other chlorines and tin porphyrins).

[0218] Another light-activated compound is cucumin (see, FIG. 12).

[0219] In certain embodiments the photosensitizers are toxic or growth inhibitors without light activation. For example, some non-iron metalloporphyrins (MPs) (see, e.g., FIGS. 1 and 2 herein) possess a powerful light-independent antimicrobial activity. In addition, haemin, the most well known natural porphyrin, possesses a significant antibacterial activity that can augmented by the presence of physiological concentrations of hydrogen peroxide or a reducing agent.

[0220] Typically, when activated by light, the toxicity or growth inhibition effect is substantially increased. Typically, they generate radical species that affect anything within proximity. In certain embodiments to get the best selectivity from targeted photosensitizers, anti-oxidants can be used to quench un-bound photosensitizers, limiting the damage only to cells where the conjugates have accumulated due to the targeting peptide. The membrane structures of the target cell act as the proton donors in this case.

[0221] In typical photodynamic antimicrobial chemotherapy (PACT) the targeted photosensitizer is “activated by the application of a light source (e.g., a visible light source, an ultraviolate light source, an infrared light source, etc.). PACT applications however need not be limited to topical use. Regions of the mouth, throat, nose, sinuses are readily illuminated. Similarly regions of the gut can readily be illuminated using endoscopic techniques. Other internal regions can be illumined using laparoscopic methods or during other surgical procedures. For example, in certain embodiments involving the insertion or repair or replacement of an implantable device (e.g., a prosthetic device) it contemplated that the device can be coated or otherwise contacted with a chimeric moiety comprising a targeting moiety attached to a photosensitizer as described herein. During the surgical procedure and/or just before closing, the device can be illuminated with an appropriate light source to activate the photosensitizer.

[0222] The targeted photosensitizers and uses thereof described herein are illustrative and not to be limiting. Using the teachings provided herein, other targeted photosensitizers and uses thereof will be available to one of skill in the art.

[0223] iv. Antimicrobial Peptides.

[0224] In certain embodiments, the effector can comprise one or more antimicrobial peptides or compound antimicrobial peptides, e.g., as described above. Numerous antimicrobial peptides are well known to those of skill in the art.

[0225] In certain embodiments the antimicrobial peptides comprise one or more amino acid sequences described above (e.g., one or more domains comprising amino acid sequences in Tables 4 and/or 5) and/or one or more of the amino acid sequences shown in Table 14. In certain embodiments the antimicrobial peptides comprise one or more amino acid sequences described in the “Collection of Anti-Microbial Peptides” (CAMP) an online database developed for advancement the understanding of antimicrobial peptides (see, e.g., Thomas et al. (2009) Nucleic Acids Research, 2009, 1-7.doi:10.1093/nar/gkp1021) available at www.bicnirrh.res.in/antimicrobial.

TABLE 14
Other illustrative antimicrobial peptides. AP numbers refer to ID in
antimicrobial peptide database (http://aps.unmc.edu/AP/main.php).

| | | | SEQ |
|---|---|---|---|
| | | | ID |
| | Effector | Structure/Sequence | No |
| AP00274 | 1BH4, Circulin A | GIPCGESCVWIPCISAALGCSCKNK | 1820 |
| | (CirA, plant | VCYRN | |
| | cyclotides, XXC, | | |
| | ZZHp) | | |
| AP00036 | 1BNB, Beta- | DFASCHTNGGICLPNRCPGHMIQIG | 1821 |
| | defensin 1 (cow) | ICFRPRVKCCRSW | |
| AP00047 | 1BNB, Bovine | GPLSCGRNGGVCIPIRCPVPMRQIG | 1822 |
| | neutrophil beta- | TCFGRPVKCCRSW | |
| | defensin 12 | | |
| | (BNBD-12, cow) | | |
| AP00428 | 1C01, MiAMP1 | SAFTVWSGPGCNNRAERYSKCGCS | 1823 |
| | (Macadamia | AIHQKGGYDFSYTGQTAALYNQA | |
| | integrifolia | GCSGVAHTRFGSSARACNPFGWKS | |
| | antimicrobial | IFIQC | |
| | peptide 1, plant) | | |
| AP00154 | 1CIX, Tachystatin | YSRCQLQGFNCVVRSYGLPTIPCC | 1824 |
| | A2 (Horseshoe | RGLTCRSYFPGSTYGRCQRY | |
| | crabs, Crustacea, | | |
| | BBS) | | |
| AP00145 | 1CW5, | VNYGNGVSCSKTKCSVNWGQAFQ | 1825 |
| | Carnobacteriocin | ERYTAGINSFVSGVASGAGSIGRRP | |
| | B2 (CnbB2, class | | |
| | IIA | | |
| | bacteriocin, bacteria) | | |
| AP00153 | 1CZ6, Androctonin | RSVCRQIKICRRRGGCYYKCTNRPY | 1826 |
| | (scorpions) | | |
| AP00152 | 1D6X, Tritrpticin | VRRFPWWWPFLRR | 1827 |
| | (synthetic) | | |
| AP00201 | 1D7N, Mastoparan | INLKALAALAKKIL | 1828 |
| | (insect) | | |
| AP00140 | 1D9J, CecropinA- | KWKLFKKIGIGKFLHSAKKF | 1829 |
| | Magainin2 hybrid | | |
| | (synthetic) | | |
| AP00178 | 1DFN, human | DCYCRIPACIAGERRYGTCIYQGRL | 1830 |
| | alpha Defensin | WAFCC | |
| | HNP-3 (human | | |
| | neutrophil peptide- | | |
| | 3, HNP3, human | | |
| | defensin, ZZHh) | | |
| AP01153 | 1DQC, Tachycitin | YLAFRCGRYSPCLDDGPNVNLYSC | 1831 |
| | (horseshoe crabs, | CSFYNCHKCLARLENCPKGLHYN | |
| | Crustacea, BBS) | AYLKVCDWPSKAGCT | |
| AP00437 | 1DUM, Magainin 2 | GIGKYLHSAKKFGKAWVGEIMNS | 1832 |
| | analog (synthetic) | | |
| AP00451 | 1E4S, Human beta | DHYNCVSSGGQCLYSACPIFTKIQG | 1833 |
| | defensin 1 (HBD-1, | TCYRGKAKCCK | |
| | human defensin) | | |
| AP00149 | 1EWS, Rabbit | MPCSCKKYCDPWEVIDGSCGLFNS | 1834 |
| | kidney defensin 1 | KYICCREK | |
| | (RK-1) | | |
| AP00141 | 1F0E, CecropinA- | KWKLFKKIPKFLHSAKKF | 1835 |
| | Magainin2 Hybrid | | |
| | (P18, synthetic) | | |
| AP00142 | 1F0G, CecropinA- | KLKLFKKIGIGKFLHSAKKF | 1836 |
| | Magainin2 Hybrid | | |
| | (synthetic) | | |
| AP00143 | 1F0H, CecropinA- | KAKLFKKIGIGKFLHSAKKF | 1837 |
| | Magainin2 Hybrid | | |
| | (synthetic) | | |
| AP00524 | 1FD4, Human beta | GIGDPVTCLKSGAICHPVFCPRRYK | 1838 |
| | defensin 2 (HBD-2, | QIGTCGLPGTKCCKKP | |
| | human defensin, | | |
| | ZZHh) | | |
| AP00438 | 1FJN, Mussel | GFGCPNNYQCHRHCKSIPGRCGGY | 1839 |
| | Defensin MGD-1 | CGGWHRLPCTCYRCG | |
| AP00155 | 1FRY, SMAP-29 | RGLRRLGRKIAHGVKKYGPTVLRII | 1840 |
| | (SMAP29, sheep | RIAG | |
| | cathelicidin) | | |
| AP00150 | 1G89, Indolicidin | ILPWKWPWWPWRR | 1841 |
| | (cow cathelicidin, | | |
| | BBN, ZZHa) | | |
| AP00156 | 1GR4, Microcin | VGIGTPISFYGGGAGHVPEYF | 1842 |
| | J25, linear | | |
| | (MccJ25, | | |
| | bacteriocin, | | |
| | bacteria) | | |
| AP00151 | 1HR1, Indolicidin | ILAWKWAWWAWRR | 1843 |
| | P to A mutant | | |
| | (synthetic) | | |
| AP00196 | 1HU5, Ovispirin-1 | KNLRRIIRKIIHIIKKYG | 1844 |
| | (synthetic) | | |
| AP00197 | 1HU6, Novispirin | KNLRRIIRKGIHIIKKYG | 1845 |
| | G10 (synthetic) | | |
| AP00198 | 1HU7, Novispirin | KNLRRITRKIIHIIKKYG | 1846 |
| | T7 (synthetic) | | |
| AP00445 | 1HVZ, Monkey | GFCRCLCRRGVCRCICTR | 1847 |
| | RTD-1 (rhesus | | |
| | theta-defensin-1, | | |
| | minidefensin-1, | | |
| | animal defensin, | | |
| | XXC, BBS, lectin, | | |
| | ZZHa) | | |
| AP00103 | 1i2v, Heliomicin | DKLIGSCVWGAVNYTSDCNGECL | 1848 |
| | variant (Hel-LL, | LRGYKGGHCGSFANVNCWCET | |
| | synthetic) | | |
| AP00216 | 1ICA, Phormia | ATCDLLSGTGINHSACAAHCLLRG | 1849 |
| | defensin A (insect | NRGGYCNGKGVCVCRN | |
| | defensin A) | | |
| AP01224 | 1Jo3, Gramicidin B | VGALAVVVWLFLWLW | 1850 |
| | (bacteria) | | |
| AP01225 | 1jo4, Gramicidin C | VGALAVVVWLYLWLW | 1851 |
| | (bacteria) | | |
| AP00191 | 1KFP, Gomesin | ECRRLCYKQRCVTYCRGR | 1852 |
| | (Gm, Spider, XXA) | | |
| AP00283 | 1KJ6, Huamn beta | GIINTLQKYYCRVRGGRCAVLSCL | 1853 |
| | defensin 3 (HBD-3, | PKEEQIGKCSTRGRKCCRRKK | |
| | human defensin, | | |
| | ZZHh) | | |
| AP00147 | 1KV4, Moricin | AKIPIKAIKTVGKAVGKGLRAINIA | 1854 |
| | (insect, silk moth) | STANDVFNFLKPKKRKA | |
| AP00227 | 1L4V, Sapecin | ATCDLLSGTGINHSACAAHCLLRG | 1855 |
| | (insect, flesh fly) | NRGGYCNGKAVCVCRN | |
| AP01161 | 1L9L, Human | GRDYRTCLTIVQKLKKMVDKPTQ | 1856 |
| | granulysin | RSVSNAATRVCTRGRSRWRDVCR | |
| | (huGran) | NFMRRYQSRVIQGLVAGETAQQIC | |
| | | EDLRLCIPSTGPL | |
| AP00026 | 1LFC, | FKCRRWQWRMKKLGAPSITCVRR | 1857 |
| | Lactoferricin B | AF | |
| | (LfcinB, cow, | | |
| | ZZHa) | | |
| AP00193 | 1M4F, human | DTHFPICIFCCGCCHRSKCGMCCKT | 1858 |
| | LEAP-1 (Hepcidin | | |
| | 25) | | |
| AP00499 | 1MAG, Gramicidin | VGALAVVVWLWLWLW | 1859 |
| | A (gA, bacteria) | | |
| AP00403 | 1MM0, Termicin | ACNFQSCWATCQAQHSIYFRRAFC | 1860 |
| | (termite defensin, | DRSQCKCVFVRG | |
| | insect defensin) | | |
| AP00194 | 1MMC, Ac-AMP2 | VGECVRGRCPSGMCCSQFGYCGK | 1861 |
| | (plant defensin, | GPKYCGR | |
| | BBS) | | |
| AP01206 | 1MQZ, Mersacidin | CTFTLPGGGGVCTLTSECIC | 1862 |
| | (bacteria) | | |
| AP00429 | 1NKL, Porcine | GYFCESCRKIIQKLEDMVGPQPNE | 1863 |
| | NK-Lysin (pig) | DTVTQAASQVCDKLKILRGLCKKI | |
| | | MRSFLRRISWDILTGKKPQAICVDI | |
| | | KICKE | |
| AP00633 | 1og7, Sakacin P/ | KYYGNGVHCGKHSCTVDWGTAIG | 1864 |
| | Sakacin 674 (SakP, | NIGNNAAANWATGGNAGWNK | |
| | class IIA | | |
| | bacteriocin, | | |
| | bacteria) | | |
| AP00195 | 1PG1, Protegrin 1 | RGGRLCYCRRRFCVCVGR | 1865 |
| | (Protegrin-1, PG-1, | | |
| | pig cathelicidin, | | |
| | XXA, ZZHa, | | |
| | BBBm) | | |
| AP00928 | 1PXQ, Subtilosin | NKGCATCSIGAACLVDGPIPDFEIA | 1866 |
| | A (XXC, class I | GATGLFGLWG | |
| | bacteriocin, Gram- | | |
| | positive bacteria) | | |
| AP00480 | 1Q71, Microcin | VGIGTPIFSYGGGAGHVPEYF | 1867 |
| | J25 (cyclic | | |
| | MccJ25, class I | | |
| | microcins, | | |
| | bacteriocins, Gram- | | |
| | negative bacteria, | | |
| | XXC; BBP) | | |
| AP00211 | 1RKK, | RRWCFRVCYRGFCYRKCR | 1868 |
| | Polyphemusin I | | |
| | (crabs, Crustacea) | | |
| AP00430 | 1T51, IsCT | ILGKIWEGIKSLF | 1869 |
| | (Scorpion) | | |
| AP00731 | 1ut3, Spheniscin-2 | SFGLCRLRRGFCARGRCRFPSIPIGR | 1870 |
| | (Sphe-2, penguin | CSRFVQCCRRVW | |
| | defensin, avian | | |
| | defensin) | | |
| AP00013 | 1VM5, Aurein 1.2 | GLFDIIKKIAESF | 1871 |
| | (frog) | | |
| AP00214 | 1WO1, | KWCFRVCYRGICYRRCR | 1872 |
| | Tachyplesin I | | |
| | (crabs, Crustacea, | | |
| | XXA, ZZHa) | | |
| AP00644 | 1xc0, Pardaxin 4 | GFFALIPKIISSPLFKTLLSAVGSALS | 1873 |
| | (Pardaxin P-4, | SSGGQE | |
| | Pardaxin P4, Pa4, | | |
| | flat fish) | | |
| AP00493 | 1XKM, Distinctin | NLVSGLIEARKYLEQLHRKLKNCKV | 1874 |
| | (two chains for | | |
| | stability and | | |
| | transport? frog) | | |
| AP00420 | 1XV3, Penaeidin- | HSSGYTRPLRKPSRPIFIRPIGCDVC | 1875 |
| | 4d (penaeidin 4, | YGIPSSTARLCCFRYGDCCHL | |
| | shrimp, Crustacea) | | |
| AP00035 | 1YTR, Plantaricin | KSSAYSLQMGATAIKQVKKLFKK | 1876 |
| | A (PlnA, | WGW | |
| | bacteriocin, | | |
| | bacteria) | | |
| AP00166 | 1Z64, Pleurocidin | GWGSFFKKAAHVGKHVGKAALT | 1877 |
| | (fish) | HYL | |
| AP00780 | 1Z6V, Human | GRRRRSVQWCAVSQPEATKCFQW | 1878 |
| | lactoferricin | QRNMRKVRGPPVSCIKRDSPIQCIQA | |
| AP00549 | 1ZFU, Plectasin | GFGCNGPWDEDDMQCHNHCKSIK | 1879 |
| | (fungi, fungal | GYKGGYCAKGGFVCKCY | |
| | defensin) | | |
| AP00177 | 1ZMH, human | CYCRIPACIAGERRYGTCIYQGRL | 1880 |
| | alpha Defensin | WAFCC | |
| | HNP-2 (human | | |
| | neutrophil peptide- | | |
| | 2, HNP2, human | | |
| | defensin, ZZHh) | | |
| AP00179 | 1ZMM, human | VCSCRLVFCRRTELRVGNCLIGGV | 1881 |
| | alpha Defensin | SFTYCCTRVD | |
| | HNP-4 (human | | |
| | neutrophil peptide- | | |
| | 4, HNP4, human | | |
| | defensin) | | |
| AP00180 | 1ZMP, human | QARATCYCRTGRCATRESLSGVCE | 1882 |
| | alpha Defensin | ISGRLYRLCCR | |
| | HD-5 (HD5, | | |
| | human defensin) | | |
| AP00181 | 1ZMQ, human | STRAFTCHCRRSCYSTEYSYGTCT | 1883 |
| | alpha Defensin | VMGINHRFCCL | |
| | HD-6 (HD6, | | |
| | human defensin) | | |
| AP00399 | 1ZRW, Spinigerin | HVDKKVADKVLLLKQLRIMRLLT | 1884 |
| | (insect, termite) | RL | |
| AP01157 | 1ZRX, Stomoxyn | RGFRKHFNKLVKKVKHTISETAHV | 1885 |
| | (insect) | AKDTAVIAGSGAAVVAAT | |
| AP00637 | 2A2B, Curvacin A/ | ARSYGNGVYCNNKKCWVNRGEA | 1886 |
| | sakacin A (CurA, | TQSIIGGMISGWASGLAGM | |
| | SakA, class IIA | | |
| | bacteriocin, | | |
| | bacteria) | | |
| AP00558 | 2B68, Cg-Def | GFGCPGNQLKCNNHCKSISCRAGY | 1887 |
| | (Crassostrea gigas | CDAATLWLRCTCTDCNGKK | |
| | defensin, oyster | | |
| | defensin, animal | | |
| | defensin) | | |
| AP01154 | 2B9K, LCI | AIKLVQSPNGNFAASFVLDGTKWI | 1888 |
| | (bacteria) | FKSKYYDSSKGYWVGIYEVWDRK | |
| AP01005 | 2DCV, Tachystatin | YVSCLFRGARCRVYSGRSCCFGYY | 1889 |
| | B1 (BBS, | CRRDFPGSIFGTCSRRNF | |
| | horseshoe crabs) | | |
| AP01006 | 2DCW, | YITCLFRGARCRVYSGRSCCFGYY | 1890 |
| | Tachystatin B1 | CRRDFPGSIFGTCSRRNF | |
| | (BBS, horseshoe | | |
| | crabs) | | |
| AP00275 | 2ERI, Circulin B | CGESCVFIPCISTLLGCSCKNKVCY | 1891 |
| | (CirB, plant | RNGVIP | |
| | cyclotides, XXC, | | |
| | ZZHp) | | |
| AP00707 | 2f3a, LLAA (LL- | RLFDKIRQVIRKF | 1892 |
| | 37-derived aurein | | |
| | 1.2 analog, retro- | | |
| | FK13, synthetic) | | |
| AP00708 | 2fbs, FK-13 (FK13, | FKRIVQRIKDFLR | 1893 |
| | NMR-discovered | | |
| | LL-37 core peptide, | | |
| | XXA, ZZHs, | | |
| | synthetic) | | |
| AP00088 | 2G9L, Gaegurin-4 | GILDTLKQFAKGVGKDLVKGAAQ | 1894 |
| | (Gaegurin 4, frog) | GVLSTVSCKLAKTC | |
| AP01011 | 2G9P, Latarcin 2a | GLFGKLIKKFGRKAISYAVKKARG | 1895 |
| | (Ltc2a, BBM, | KH | |
| | spider) | | |
| AP00612 | 2GDL, Fowlicidin- | LVQRGRFGRFLRKIRRFRPKVTITI | 1896 |
| | 2 (chCATH-2, bird | QGSARFG | |
| | cathelicidin, | | |
| | chicken | | |
| | cathelicidin, BBL) | | |
| AP00402 | 2GL1, VrD2 | KTCENLANTYRGPCFTTGSCDDHC | 1897 |
| | (Vigna radiata | KNKEHLRSGRCRDDFRCWCTRNC | |
| | defensin 2, plant | | |
| | defensin, mung | | |
| | bean) | | |
| AP00285 | 2GW9, Cryptdin-4 | GLLCYCRKGHCKRGERVRGTCGIR | 1898 |
| | (Crp4, animal | FLYCCPRR | |
| | defensin, alpha, | | |
| | mouse) | | |
| AP00613 | 2hfr, Fowlicidin-3 | RVKRFWPLVPVAINTVAAGINLYK | 1899 |
| | (chCATH-3, bird | AIRRK | |
| | cathelicidin, | | |
| | chicken | | |
| | cathelicidin) | | |
| AP01007 | 2JMY, CM15 | KWKLFKKIGAVLKVL | 1900 |
| | (Synthetic) | | |
| AP00728 | 2jni, Arenicin-2 | RWCVYAYVRIRGVLVRYRRCW | 1901 |
| | (marine polychaeta, | | |
| | BBBm) | | |
| AP00473 | 2jos, Piscidin 1 | FFHHIFRGIVHVGKTIHRLVTG | 1902 |
| | (fish) | | |
| AP01151 | 2JPJ, Lactococcin | GTWDDIGQGIGRVAYWVGKALGN | 1903 |
| | G-a (chain a, class | LSDVNQASRINRKKKH | |
| | IIb bacteriocin, | | |
| | bacteria. For chain | | |
| | b, see info) | | |
| AP00757 | 2jpy, Phylloseptin- | FLSLIPHAINAVSTLVHHF | 1904 |
| | H2 (PLS-H2, | | |
| | Phylloseptin-2, PS- | | |
| | 2) (XXA, frog) | | |
| AP00546 | 2jq0, Phylloseptin- | FLSLIPHAINAVSAIAKHN | 1905 |
| | 1 (Phylloseptin-H1, | | |
| | PLS-H1, PS-1, | | |
| | XXA, frog) | | |
| AP00758 | 2jq1, Phylloseptin- | FLSLIPHAINAVSALANHG | 1906 |
| | 3 (Phylloseptin-H3, | | |
| | PLS-H3, PS-3) | | |
| | (XXA, frog) | | |
| AP00727 | 2jsb, Arenicin-1 | RWCVYAYVRVRGVLVRYRRCW | 1907 |
| | (marine polychaeta, | | |
| | BBBm) | | |
| AP00592 | 2k10, Ranatuerin- | GILSSFKGVAKGVAKDLAGKLLET | 1908 |
| | 2CSa (frog) | LKCKITGC | |
| AP00485 | 2K38, Cupiennin | GFGALFKFLAKKVAKTVAKQAAK | 1909 |
| | 1a (spider) | QGAKYVVNKQME | |
| AP00310 | 2K6O, Human LL- | LLGDFFRKSKEKIGKEFKRIVQRIK | 1910 |
| | 37 (LL37, human | DFLRNLVPRTES | |
| | cathelicidin; | | |
| | released by | | |
| | proteinase 3 from | | |
| | its precursor in | | |
| | neutrophils; FALL- | | |
| | 39; BBB, BBM, | | |
| | BBP, BBW, BBD, | | |
| | BBL, ZZHh) | | |
| AP00199 | 2LEU, Leucocin A | KYYGNGVHCTKSGCSVNWGEAFS | 1911 |
| | (LeuA, class IIa | AGVHRLANGGNGFW | |
| | bacteriocin, | | |
| | bacteria) | | |
| AP00144 | 2MAG, Magainin 2 | GIGKFLHSAKKFGKAFVGEIMNS | 1912 |
| | (frog) | | |
| AP00146 | 2MLT, Melittin | GIGAVLKVLTTGLPALISWIKRKRQQ | 1913 |
| | (insect, ZZHa) | | |
| AP01010 | 2PCO, Latarcin 1 | SMWSGMWRRKLKKLRNALKKKL | 1914 |
| | (Ltc1, BBM, | KGEK | |
| | spider) | | |
| AP00176 | 2PM1, human | ACYCRIPACIAGERRYGTCIYQGRL | 1915 |
| | alpha Defensin | WAFCC | |
| | HNP-1 (human | | |
| | neutrophil peptide- | | |
| | 1, HNP1, human | | |
| | defensin, ZZHh) | | |
| AP01158 | 2RLG, RP-1 | ALYKKFKKKLLKSLKRL | 1916 |
| | (synthetic) | | |
| AP00102 | 8TFV, Thanatin | GSKKPVPIIYCNRRTGKCQRM | 1917 |
| | (insect) | | |
| AP00995 | A58718, Carnocin | GSEIQPR | 1918 |
| | UI49 (bacteria) | | |
| AP01002 | AAC18827, | KSWSLCTPGCARTGSFNSYCC | 1919 |
| | Mutacin III | | |
| | (mutacin 1140, | | |
| | bacteria) | | |
| AP00987 | ABI74601, Arasin | SRWPSPGRPRPFPGRPKPIFRPRPCN | 1920 |
| | 1 (Crustacea) | CYAPPCPCDRW | |
| AP01000 | CAA63706, | GSGVIPTISHECHMNSFQFVFTCCS | 1921 |
| | variacin | | |
| | (lantibiotic, class I | | |
| | bacteriocin, | | |
| | bacteria) | | |
| AP00361 | O15946, Lebocin 4 | DLRFWNPREKLPLPTLPPFNPKPIYI | 1922 |
| | (insect, silk moth) | DMGNRY | |
| AP00343 | O16825, Andropin | VFIDILDKMENAIHKAAQAGIGIAK | 1923 |
| | (insect, fruit fly) | PIEKMILPK | |
| AP00417 | O17513, | SIGTAVKKAVPIAKKVGKVAIPIAK | 1924 |
| | Ceratotoxin D | AVLSVVGQLVG | |
| | (insect, fly) | | |
| AP00435 | O18494, Styelin C | GWFGKAFRSVSNFYKKHKTYIHA | 1925 |
| | (sea squirt, | GLSAATLL | |
| | tunicate, XXA) | | |
| AP00330 | O18495, Styelin D | GWLRKAAKSVGKFYYKHKYYIKA | 1926 |
| | (Sea squirt, | AWQIGKHAL | |
| | tunicate, XXA) | | |
| AP00331 | O18495, Styelin E | GWLRKAAKSVGKFYYKHKYYIKA | 1927 |
| | (Sea squirt, | AWKIGRHAL | |
| | tunicate, XXA) | | |
| AP01001 | O54329, Mutacin II | NRWWQGVVPTVSYECRMNSWQH | 1928 |
| | (lantibiotic, | VFTCC | |
| | mutacin H-29B, J- | | |
| | T8, class I | | |
| | bacteriocin, | | |
| | bacteria) | | |
| AP00342 | O81338, | AKCIKNGKGCREDQGPPFCCSGFC | 1929 |
| | Antimicrobial | YRQVGWARGYCKNR | |
| | peptide 1 (plant) | | |
| AP00373 | O96059, Moricin 2 | AKIPIKAIKTVGKAVGKGLRAINIA | 1930 |
| | (insect) | STANDVFNFLKPKKRKH | |
| AP00449 | P01190, | SYSMEHFRWGKPV | 1931 |
| | Melanotropin alpha | | |
| | (Alpha-MSH) | | |
| AP00187 | P01376, | VVCACRRALCLPRERRAGFCRIRG | 1932 |
| | CORTICOSTATIN | RIHPLCCRR | |
| | III (MCP-1, rabbit | | |
| | neutrophil peptide | | |
| | 1, NP-1) (animal | | |
| | defensin, alpha- | | |
| | defensin, rabbit) | | |
| AP00188 | P01377, | VVCACRRALCLPLERRAGFCRIRG | 1933 |
| | CORTICOSTATIN | RIHPLCCRR | |
| | IV (MCP-2, rabbit | | |
| | neutrophil defensin | | |
| | 2, NP-2, animal | | |
| | defensin, rabbit) | | |
| AP00049 | P01505, Bombinin | GIGALSAKGALKGLAKGLAEHFAN | 1934 |
| | (toad) | | |
| AP00139 | P01507, Cecropin | KWKLFKKIEKVGQNIRDGIIKAGP | 1935 |
| | A (insect, ZZHa) | AVAVVGQATQIAK | |
| AP00128 | P01509, Cecropin | KWKIFKKIEKVGRNIRNGIIKAGPA | 1936 |
| | B (insect, silk | VAVLGEAKAL | |
| | moth) | | |
| AP00131 | P01511, Cecropin | WNPFKELERAGQRVRDAIISAGPA | 1937 |
| | D (insect, moth) | VATVAQATALAK | |
| AP00136 | P01518, Crabrolin | FLPLILRKIVTAL | 1938 |
| | (insect, XXA) | | |
| AP00183 | P04142, Cecropin | RWKIFKKIEKMGRNIRDGIVKAGP | 1939 |
| | B (insect) | AIEVLGSAKAI | |
| AP00448 | P04205, | INLKAIAALAKKLL | 1940 |
| | Mastoparan M | | |
| | (MP-M, insect, | | |
| | XXA) | | |
| AP00234 | P06833, | SDEKASPDKHHRFSLSRYAKLANR | 1941 |
| | Seminalplasmin | LANPKLLETFLSKWIGDRGNRSV | |
| | (SPLN, calcium | | |
| | transporter | | |
| | inhibitor, caltrin, | | |
| | cow) | | |
| AP00314 | P07466, Rabbit | VFCTCRGFLCGSGERASGSCTINGV | 1942 |
| | neutrophil peptide | RHTLCCRR | |
| | 5 (NP-5, animal | | |
| | defensin, alpha- | | |
| | defensin) | | |
| AP00189 | P07467, Rabbit | VSCTCRRFSCGFGERASGSCTVNG | 1943 |
| | neutrophil peptide | VRHTLCCRR | |
| | 4 (NP-4) | | |
| AP00186 | P07468, | GRCVCRKQLLCSYRERRIGDCKIR | 1944 |
| | CORTICOSTATIN | GVRFPFCCPR | |
| | II (Rabbit | | |
| | neutrophil peptide | | |
| | 3b (NP-3b, rabbit) | | |
| AP00185 | P07469, | ICACRRRFCPNSERFSGYCRVNGA | 1945 |
| | CORTICOSTATIN | RYVRCCSRR | |
| | I (rabbit) | | |
| AP00217 | P07469, Rabbit | GICACRRRFCPNSERFSGYCRVNG | 1946 |
| | neutrophil defensin | ARYVRCCSRR | |
| | 3a (NP-3a, animal | | |
| | defensin, alpha- | | |
| | defensin) | | |
| AP00067 | P07493, | SKITDILAKLGKVLAHV | 1947 |
| | Bombolitin II | | |
| | (insect, bee) | | |
| AP00068 | P07494, | IKIMDILAKLGKVLAHV | 1948 |
| | Bombolitin III | | |
| | (insect, bee) | | |
| AP00069 | P07495, | INIKDILAKLVKVLGHV | 1949 |
| | Bombolitin IV | | |
| | (insect, bee) | | |
| AP00070 | P07496, | INVLGILGLLGKALSHL | 1950 |
| | Bombolitin V | | |
| | (insect, bee) | | |
| AP00236 | P07504, Pyrularia | KSCCRNTWARNCYNVCRLPGTISR | 1951 |
| | thionin (Pp-TH, | EICAKKCDCKIISGTTCPSDYPK | |
| | plant) | | |
| AP00230 | P08375, Sarcotoxin | GWLKKIGKKIERVGQHTRDATIQG | 1952 |
| | IA (insect, flesh | LGIAQQAANVAATAR | |
| AP00231 | P08376, Sarcotoxin | GWLKKIGKKIERVGQHTRDATIQV | 1953 |
| | IB (insect, flesh | IGVAQQAANVAATAR | |
| AP00232 | P08377, Sarcotoxin | GWLRKIGKKIERVGQHTRDATIQV | 1954 |
| | IC (insect, flesh | LGIAQQAANVAATAR | |
| AP00066 | P10521, | IKITTMLAKLGKVLAHV | 1955 |
| | Bombolitin I | | |
| | (insect, bee) | | |
| AP00206 | P10946, Lantibiotic | WKSESLCTPGCVTGALQTCFLQTL | 1956 |
| | subtilin (class I | TCNCKISK | |
| | bacteriocin, | | |
| | bacteria) | | |
| AP00312 | P11477, Cryptdin-2 | LRDLVCYCRARGCKGRERMNGTC | 1957 |
| | (Crp2, animal | RKGHLLYMLCCR | |
| | defensin, alpha, | | |
| | mouse) | | |
| AP00205 | P13068, Nisin A | ITSISLCTPGCKTGALMGCNMKTA | 1958 |
| | (lantibiotic, class I | TCHCSIHVSK | |
| | bacteriocin, | | |
| | bacteria) | | |
| AP00215 | P14214, | RWCFRVCYRGICYRKCR | 1959 |
| | Tachyplesin II | | |
| | (crabs, Crustacea) | | |
| AP00212 | P14216, | RRWCFRVCYKGFCYRKCR | 1960 |
| | Polyphemusin II | | |
| | (crabs, Crustacea, | | |
| | XXA, ZZHa. | | |
| | Derivatives: T22) | | |
| AP00134 | P14661, Cecropin | SWLSKTAKKLENSAKKRISEGIAIA | 1961 |
| | P1 (pig) | IQGGPR | |
| AP00011 | P14662, | WNPFKELERAGQRVRDAVISAAPA | 1962 |
| | Bactericidin B2 | VATVGQAAAIARG | |
| | (insect) | | |
| AP00032 | P14663, | WNPFKELERAGQRVRDAIISAGPA | 1963 |
| | Bactericidin B-3 | VATVGQAAAIARG | |
| | (insect) | | |
| AP00033 | P14664, | WNPFKELERAGQRVRDAIISAAPA | 1964 |
| | Bactericidin B-4 | VATVGQAAAIARG | |
| | (insect) | | |
| AP00034 | P14665, | WNPFKELERAGQRVRDAVISAAA | 1965 |
| | Bactericidin B-5P | VATVGQAAAIARG | |
| | (insect) | | |
| AP00125 | P14666, Cecropin | RWKIFKKIEKVGQNIRDGIVKAGP | 1966 |
| | (insect, silk moth) | AVAVVGQAATI | |
| AP00002 | P15450, | YVPLPNVPQPGRRPFPTFPGQGPFN | 1967 |
| | ABAECIN (insect, | PKIKWPQGY | |
| | honeybee) | | |
| AP00505 | P15516, human | DSHAKRHHGYKRKFHEKHHSHRGY | 1968 |
| | Histatin 5 (ZZHs; | | |
| | derivatives Dh-5) | | |
| AP00520 | P15516, human | DSHAKRHHGYKRKFHEKHHSHRG | 1969 |
| | Histatin 3 | YRSNYLYDN | |
| AP00523 | P15516, human | KFHEKHHSHRGY | 1970 |
| | Histatin 8 | | |
| AP00226 | P17722, Royalisin | VTCDLLSFKGQVNDSACAANCLSL | 1971 |
| | (insect, honeybee) | GKAGGHCEKVGCICRKTSFKDLW | |
| | | DKRF | |
| AP00213 | P18252, | KWCFRVCYRGICYRKCR | 1972 |
| | Tachyplesin III | | |
| | (horseshoe crabs, | | |
| | Crustacea) | | |
| AP00233 | P18312, Sarcotoxin | GWIRDFGKRIERVGQHTRDATIQTI | 1973 |
| | ID (insect, flesh | AVAQQAANVAATLKG | |
| AP00207 | P19578, Lantibiotic | TAGPAIRASVKQCQKTLKATRLFT | 1974 |
| | PEP5 (class I | VSCKGKNGCK | |
| | bacteriocin, | | |
| | bacteria) | | |
| AP00009 | P19660, | RFRPPIRRPPIRPPFYPPFRPPIRPPIF | 1975 |
| | BACTENECIN 5 | PPIRPPFRPPLGPFP | |
| | (bac5, cow | | |
| | cathelicidin) | | |
| AP00010 | P19661, | RRIRPRPPRLPRPRPRPLPFPRPGPR | 1976 |
| | BACTENECIN 7 | PIPRPLPFPRPGPRPIPRPLPFPRPGP | |
| | (bac7, cow | RPIPRPL | |
| | cathelicidin) | | |
| AP00200 | P21564, | LKLKSIVSWAKKVL | 1977 |
| | Mastoparan B | | |
| | (MP-B, insect, | | |
| | XXA) | | |
| AP00005 | P21663, Andropin | VFIDILDKVENAIHNAAQVGIGFAK | 1978 |
| | (insect, fly) | PFEKLINPK | |
| AP00008 | P22226, Cyclic | RLCRIVVIRVCR | 1979 |
| | dodecapeptide | | |
| | (cow cathelicidin) | | |
| AP01205 | P23826, Lactocin S | STPVLASVAVSMELLPTASVLYSD | 1980 |
| | (XXD3, bacteria) | VAGCFKYSAKHHC | |
| AP00239 | P24335, XPF (the | GWASKIGQTLGKIAKVGLKELIQPK | 1981 |
| | xenopsin precursor | | |
| | fragment, African | | |
| | clawed frog) | | |
| AP00235 | P25068, Bovine | NPVSCVRNKGICVPIRCPGSMKQIG | 1982 |
| | tracheal | TCVGRAVKCCRKK | |
| | antimicrobial | | |
| | peptide (TAP, cow) | | |
| AP00418 | P25230, CAP18 | GLRKRLRKFRNKIKEKLKKIGQKIQ | 1983 |
| | (rabbit cathelicidin, | GFVPKLAPRTDY | |
| | BBL) | | |
| AP00203 | P25403, Mj-AMP1 | QCIGNGGRCNENVGPPYCCSGFCL | 1984 |
| | (MjAMP1, plant | RQPGQGYGYCKNR | |
| | defensin) | | |
| AP00202 | P25404, Mj-AMP2 | CIGNGGRCNENVGPPYCCSGFCLR | 1985 |
| | (MjAMP2, plant | QPNQGYGVCRNR | |
| | defensin) | | |
| AP00138 | P28310, Cryptdin-3 | LRDLVCYCRKRGCKRRERMNGTC | 1986 |
| | (Crp3, animal | RKGHLMYTLCCR | |
| | defensin, alpha, | | |
| | mouse) | | |
| AP00184 | P28794, MBP-1 | RSGRGECRRQCLRRHEGQPWETQ | 1987 |
| | (plant) | ECMRRCRRRG | |
| AP00050 | P29002, Bombinin- | GIGASILSAGKSALKGLAKGLAEHF | 1988 |
| | like peptide 1 | AN | |
| | (BLP-1, toad) | | |
| AP00051 | P29003, Bombinin- | GIGSAILSAGKSALKGLAKGLAEHF | 1989 |
| | like peptide 2 | AN | |
| | (BLP-2, toad) | | |
| AP00052 | P29004, Bombinin- | GIGAAILSAGKSALKGLAKGLAEHF | 1990 |
| | like peptide 3 | | |
| | (BLP-3, XXA, | | |
| | toad) | | |
| AP00053 | P29005, Bombinin- | GIGAAILSAGKSIIKGLANGLAEHF | 1991 |
| | like peptide 4 | | |
| | (BLP-4, toad) | | |
| AP00634 | P29430, Pediocin | KYYGNGVTCGKHSCSVDWGKATT | 1992 |
| | PA-1/AcH | CIINNGAMAWATGGHQGNHKC | |
| | (PedPA1, class IIA | | |
| | bacteriocin, bacteria) | | |
| AP00204 | P29559, Nisin Z | ITSISLCTPGCKTGALMGCNMKTA | 1993 |
| | (lantibiotic, class I | TCNCSIHVSK | |
| | bacteriocin, | | |
| | bacteria) | | |
| AP00130 | P29561, Cecropin | GWLKKLGKRIERIGQHTRDATIQG | 1994 |
| | C (insect, fly) | LGIAQQAANVAATAR | |
| AP00001 | P31107, | GLWSKIKEVGKEAAKAAAKAAGK | 1995 |
| | ADENOREGULIN | AALGAVSEAV | |
| | (Dermaseptin B2, | | |
| | Dermaseptin-B2, | | |
| | DRS-B2, DRS B2, | | |
| | frog) | | |
| AP00228 | P31529, Sapecin B | LTCEIDRSLCLLHCRLKGYLRAYCS | 1996 |
| | (insect, flesh fly) | QQKVCRCVQ | |
| AP00229 | P31530, Sapecin C | ATCDLLSGIGVQHSACALHCVFRG | 1997 |
| | (insect, flesh fly) | NRGGYCTGKGICVCRN | |
| AP00218 | P32195, Protegrin | RGGRLCYCRRRFCICV | 1998 |
| | 2 (PG-2, pig | | |
| | cathelicidin) | | |
| AP00219 | P32196, Protegrin | RGGGLCYCRRRFCVCVGR | 1999 |
| | 3 (PG-3, pig | | |
| | cathelicidin) | | |
| AP00073 | P32412, Brevinin- | FLPLLAGLAANFLPKIFCKITRKC | 2000 |
| | 1E (frog) | | |
| AP00080 | P32414, | GIFSKLGRKKIKNLLISGLKNVGKE | 2001 |
| | Esculentin-1 (frog) | VGMDVVRTGIDIAGCKIKGEC | |
| AP00074 | P32423, Brevinin-1 | FLPVLAGIAAKVVPALFCKITKKC | 2002 |
| | (frog) | | |
| AP00075 | P32424, Brevinin-2 | GLLDSLKGFAATAGKGVLQSLLST | 2003 |
| | (frog) | ASCKLAKTC | |
| AP00175 | P34084, Macaque | DSHEERHHGRHGHHKYGRKFHEK | 2004 |
| | histatin (M-Histatin | HHSHRGYRSNYLYDN | |
| | 1, primate, | | |
| | monkey) | | |
| AP00006 | P35581, Apidaecin | GNNRPVYIPQPRPPHPRI | 2005 |
| | IA (insect, | | |
| | honeybee) | | |
| AP00007 | P35581, Apidaecin | GNNRPVYIPQPRPPHPRL | 2006 |
| | IB (insect, | | |
| | honeybee) | | |
| AP00414 | P36190, | SIGSALKKALPVAKKIGKIALPIAK | 2007 |
| | Ceratotoxin A | AALP | |
| | (insect, fly) | | |
| AP00415 | P36191, | SIGSAFKKALPVAKKIGKAALPIAK | 2008 |
| | Ceratotoxin B | AALP | |
| | (insect, fly) | | |
| AP00172 | P36193, Drosocin | GKPRPYSPRPTSHPRPIRV | 2009 |
| | (insect) | | |
| AP00170 | P37362, | VDKGSYLPRPTPPRPIYNRN | 2010 |
| | Pyrrhocoricin | | |
| | (insect) | | |
| AP00635 | P38577, | KYYGNGVHCTKSGCSVNWGEAAS | 2011 |
| | Mesentericin Y105 | AGIHRLANGGNGFW | |
| | (MesY105, class | | |
| | IIA bacteriocin, | | |
| | bacteria) | | |
| AP00636 | P38579, | AISYGNGVYCNKEKCWVNKAENK | 2012 |
| | Carnobacteriocin | QAITGIVIGGWASSLAGMGH | |
| | BM1 (CnbBM1, | | |
| | PiscV1b, class IIA | | |
| | bacteriocin, | | |
| | bacteria) | | |
| AP00209 | P39080, Peptide | GVLSNVIGYLKKLGTGALNAVLKQ | 2013 |
| | PGQ (frog) | | |
| AP00513 | P39084, Ranalexin | FLGGLIKIVPAMICAVTKKC | 2014 |
| | (frog) | | |
| AP00071 | P40835, Brevinin- | FLPAIFRMAAKVVPTIICSITKKC | 2015 |
| | 1EA (frog) | | |
| AP00072 | P40836, Brevinin- | VIPFVASVAAEMQHVYCAASRKC | 2016 |
| | 1EB (frog) | | |
| AP00076 | P40837, Brevinin- | GILDTLKNLAISAAKGAAQGLVNK | 2017 |
| | 2EA (frog) | ASCKLSGQC | |
| AP00077 | P40838, Brevinin- | GILDTLKNLAKTAGKGALQGLVK | 2018 |
| | 2EB (frog) | MASCKLSGQC | |
| AP00078 | P40839, Brevinin- | GILLDKLKNFAKTAGKGVLQSLLN | 2019 |
| | 2EC (frog) | TASCKLSGQC | |
| AP00079 | P40840, Brevinin- | GILDSLKNLAKNAGQILLNKASCK | 2020 |
| | 2ED (frog) | LSGQC | |
| AP00081 | P40843, | GIFSKLAGKKIKNLLISGLKNVGKE | 2021 |
| | Esculentin-1A | VGMDVVRTGIDIAGCKIKGEC | |
| | (frog) | | |
| AP00082 | P40844, | GIFSKLAGKKLKNLLISGLKNVGK | 2022 |
| | Esculentin-1B | EVGMDVVRTGIDIAGCKIKGEC | |
| | (frog) | | |
| AP00083 | P40845, | GILSLVKGVAKLAGKGLAKEGGKF | 2023 |
| | Esculentin-2A | GLELIACKIAKQC | |
| | (frog) | | |
| AP00084 | P40846, | GIFSLVKGAAKLAGKGLAKEGGKF | 2024 |
| | Esculentin-2B | GLELIACKIAKQC | |
| | (ES2B_RANES, | | |
| | frog) | | |
| AP00299 | P46156, Chicken | GRKSDCFRKSGFCAFLKCPSLTLIS | 2025 |
| | gallinacin 1 (Gal 1, | GKCSRFYLCCKRIW | |
| | avian beta- | | |
| | defensin, bird) | | |
| AP00300 | P46157, Gallinacin | GRKSDCFRKNGFCAFLKCPYLTLIS | 2026 |
| | 1 alpha (avian beta- | GKCSRFHLCCKRIW | |
| | defensin, Bird), | | |
| AP00298 | P46158, Chicken | LFCKGGSCHFGGCPSHLIKVGSCFG | 2027 |
| | gallinacin 2 (Gal 2, | FRSCCKWPWNA | |
| | avian beta- | | |
| | defensin, bird) | | |
| AP00037 | P46160, Beta- | VRNHVTCRINRGFCVPIRCPGRTRQ | 2028 |
| | defensin 2 (cow) | IGTCFGPRIKCCRSW | |
| AP00038 | P46161, Beta- | QGVRNHVTCRINRGFCVPIRCPGR | 2029 |
| | defensin 3 (cow) | TRQIGTCFGPRIKCCRSW | |
| AP00039 | P46162, Beta- | QRVRNPQSCRWNMGVCIPFLCRV | 2030 |
| | defensin 4 (cow) | GMRQIGTCFGPRVPCCRR | |
| AP00040 | P46163, Beta- | QVVRNPQSCRWNMGVCIPISCPGN | 2031 |
| | defensin 5 (cow) | MRQIGTCFGPRVPCCRRW | |
| AP00041 | P46164, Beta- | QGVRNHVTCRIYGGFCVPIRCPGR | 2032 |
| | defensin 6 (cow) | TRQIGTCFGRPVKCCRRW | |
| AP00042 | P46165, Beta- | QGVRNFVTCRINRGFCVPIRCPGHR | 2033 |
| | defensin 7 (cow) | RQIGTCLGPRIKCCR | |
| AP00043 | P46166, Beta- | VRNFVTCRINRGFCVPIRCPGHRRQ | 2034 |
| | defensin 8 (cow) | IGTCLGPQIKCCR | |
| AP00044 | P46167, Beta- | QGVRNFVTCRINRGFCVPIRCPGHR | 2035 |
| | defensin 9 (cow) | RQIGTCLAPQIKCCR | |
| AP00045 | P46168, Beta- | QGVRSYLSCWGNRGICLLNRCPGR | 2036 |
| | defensin 10 (cow) | MRQIGTCLAPRVKCCR | |
| AP00046 | P46169, Beta- | GPLSCRRNGGVCIPIRCPGPMRQIG | 2037 |
| | defensin 11 (cow) | TCFGRPVKCCRSW | |
| AP00048 | P46171, Bovine | SGISGPLSCGRNGGVCIPIRCPVPM | 2038 |
| | beta-defensin 13 | RQIGTCFGRPVKCCRSW | |
| | (cow) | | |
| AP00350 | P48821, Enbocin | PWNIFKEIERAVARTRDAVISAGPA | 2039 |
| | (insect, moth) | VRTVAAATSVAS | |
| AP00173 | P49112, GNCP-2 | RCICTTRTCRFPYRRLGTCLFQNRV | 2040 |
| | (Guinea pig | YTFCC | |
| | neutrophil cationic | | |
| | peptide 2) | | |
| AP00369 | P49930, PMAP-23 | RIIDLLWRVRRPQKPKFVTVWVR | 2041 |
| | (PMAP23, pig | | |
| | cathelicidin) | | |
| AP00370 | P49931, PMAP-36 | VGRFRRLRKKTRKRLKKIGKVLK | 2042 |
| | (PMAP36, pig | WIPPIVGSIPLGCG | |
| | cathelicidin) | | |
| AP00371 | P49932, PMAP-37 | GLLSRLRDFLSDRGRRLGEKIERIG | 2043 |
| | (PMAP37, pig | QKIKDLSEFFQS | |
| | cathelicidin) | | |
| AP00220 | P49933, Protegrin | RGGRLCYCRGWICFCVGR | 2044 |
| | 4 (PG-4, pig | | |
| | cathelicidin) | | |
| AP00221 | P49934, Protegrin | RGGRLCYCRPRFCVCVGR | 2045 |
| | 5 (PG-5, pig | | |
| | cathelicidin) | | |
| AP00346 | P50720, Hyphancin | RWKIFKKIERVGQNVRDGIIKAGP | 2046 |
| | IIID (Fall | AIQVLGTAKAL | |
| | webworm, insect) | | |
| AP00347 | P50721, Hyphancin | RWKFFKKIERVGQNVRDGLIKAGP | 2047 |
| | IIIE (Fall | AIQVLGAAKAL | |
| | webworm, insect) | | |
| AP00348 | P50722, Hyphancin | RWKVFKKIEKVGRNIRDGVIKAGP | 2048 |
| | IIIF (Fall | AIAVVGQAKAL | |
| | webworm, insect) | | |
| AP00349 | P50723, Hyphancin | RWKVFKKIEKVGRHIRDGVIKAGP | 2049 |
| | IIIG (Fall | AITVVGQATAL | |
| | webworm, insect) | | |
| AP00281 | P51473, mCRAMP | GLLRKGGEKIGEKLKKIGQKIKNFF | 2050 |
| | (mouse | QKLVPQPEQ | |
| | cathelicidin; | | |
| | derivatives: | | |
| | CRAMP 18) | | |
| AP00366 | P54228, BMAP-27 | GRFKRFRKKFKKLFKKLSPVIPLLH | 2051 |
| | (BMAP27, cow | LG | |
| | cathelicidin, ZZHs, | | |
| | derivatives BMAP- | | |
| | 18 and BMAP-15) | | |
| AP00367 | P54229, BMAP-28 | GGLRSLGRKILRAWKKYGPIIVPIIR | 2052 |
| | (BMAP28, cow | IG | |
| | cathelicidin) | | |
| AP00450 | P54230, Cyclic | RICRIIFLRVCR | 2053 |
| | dodecapeptide | | |
| | (sheep cathelicidin) | | |
| AP00359 | P54684, Lebocin | DLRFLYPRGKLPVPTPPPFNPKPIYI | 2054 |
| | ½ (insect, silk | DMGNRY | |
| | moth) | | |
| AP00360 | P55796, Lebocin 3 | DLRFLYPRGKLPVPTLPPFNPKPIYI | 2055 |
| | (insect, silk moth) | DMGNRY | |
| AP00307 | P55897, Buforin I | AGRGKQGGKVRAKAKTRSSRAGL | 2056 |
| | (toad) | QFPVGRVHRLLRKGNY | |
| AP00308 | P55897, Buforin II | TRSSRAGLQFPVGRVHRLLRK | 2057 |
| | (toad) | | |
| AP00240 | P56226, Caerin 1.1 | GLLSVLGSVAKHVLPHVVPVIAEHL | 2058 |
| | (frog, ZZHa) | | |
| AP00241 | P56227, Caerin 1.2 | GLLGVLGSVAKHVLPHVVPVIAEHL | 2059 |
| | (frog) | | |
| AP00242 | P56228, Caerin 1.3 | GLLSVLGSVAQHVLPHVVPVIAEHL | 2060 |
| | (frog) | | |
| AP00243 | P56229, Caerin 1.4 | GLLSSLSSVAKHVLPHVVPVIAEHL | 2061 |
| | (frog) | | |
| AP00244 | P56230, Caerin 1.5 | GLLSVLGSVVKHVIPHVVPVIAEHL | 2062 |
| | (frog) | | |
| AP00245 | P56231, Caerin 1.6 | GLFSVLGAVAKHVLPHVVPVIAEK | 2063 |
| | (frog) | | |
| AP00246 | P56232, Caerin 1.7 | GLFKVLGSVAKHLLPHVAPVIAEK | 2064 |
| | (frog) | | |
| AP00249 | P56233, Caerin 2.1 | GLVSSIGRALGGLLADVVKSKGQPA | 2065 |
| | (frog) | | |
| AP00250 | P56234, Caerin 2.2 | GLVSSIGRALGGLLADVVKSKEQPA | 2066 |
| | (frog) | | |
| AP00251 | P56236, Caerin 2.4 | GLVSSIGKALGGLLADVVKTKEQPA | 2067 |
| | (frog) | | |
| AP00252 | P56236, Caerin 2.5 | GLVSSIGRALGGLLADVVKSKEQPA | 2068 |
| | (frog) | | |
| AP00253 | P56238, Caerin 3.1 | GLWQKIKDKASELVSGIVEGVK | 2069 |
| | (frog) | | |
| AP00254 | P56238, Caerin 3.2 | GLWEKIKEKASELVSGIVEGVK | 2070 |
| | (frog) | | |
| AP00255 | P56240, Caerin 3.3 | GLWEKIKEKANELVSGIVEGVK | 2071 |
| | (frog) | | |
| AP00256 | P56241, Caerin 3.4 | GLWEKIREKANELVSGIVEGVK | 2072 |
| | (frog) | | |
| AP00257 | P56242, Caerin 4.1 | GLWQKIKSAAGDLASGIVEGIKS | 2073 |
| | (frog) | | |
| AP00258 | P56243, Caerin 4.2 | GLWQKIKSAAGDLASGIVEGIKS | 2074 |
| | (frog) | | |
| AP00259 | P56244, Caerin 4.3 | GLWQKIKNAAGDLASGIVEGIKS | 2075 |
| | (frog) | | |
| AP00434 | P56249, Frenatin 3 | GLMSVLGHAVGNVLGGLFKS | 2076 |
| | (frog) | | |
| AP00272 | P56386, Murine | DQYKCLQHGGFCLRSSCPSNTKLQ | 2077 |
| | beta-defensin 1 | GTCKPDKPNCCKS | |
| | (mBD-1, mouse) | | |
| AP00368 | P56425, BMAP-34 | GLFRRLRDSIRRGQQKILEKARRIG | 2078 |
| | (BMAP34, cow | ERIKDIFRG | |
| | cathelicidin) | | |
| AP00273 | P56685, Buthinin | SIVPIRCRSNRDCRRFCGFRGGRCT | 2079 |
| | (Sahara scorpion) | YARQCLCGY | |
| AP00282 | P56872, | SIPCGESCVFIPCTVTALLGCSCKSK | 2080 |
| | Cyclopsychotride | VCYKN | |
| | A (CPT, plant | | |
| | cyclotides, XXC) | | |
| AP00094 | P56917, Temporin | FLPLIGRVLSGIL | 2081 |
| | A (XXA, frog) | | |
| AP00096 | P56918, Temporin | LLPILGNLLNGLL | 2082 |
| | C (XXA, frog) | | |
| AP00097 | P56920, Temporin | VLPIIGNLLNSLL | 2083 |
| | E (XXA, frog) | | |
| AP00098 | P56921, Temporin | FLPLIGKVLSGIL | 2084 |
| | F (XXA, frog) | | |
| AP00100 | P56923, Temporin | LLPNLLKSLL | 2085 |
| | K (XXA, frog) | | |
| AP00295 | P56928, eNAP-2 | EVERKHPLGGSRPGRCPTVPPGTF | 2086 |
| | (horse) | GHCACLCTGDASEPKGQKCCSN | |
| AP00101 | P57104, Temporin | FVQWFSKFLGRIL | 2087 |
| | L (XXA, frog) | | |
| AP00095 | P79874, Temporin | LLPIVGNLLKSLL | 2088 |
| | B (XXA, frog) | | |
| AP00099 | P79875, Temporin | FFPVIGRILNGIL | 2089 |
| | G (XXA, frog) | | |
| AP00413 | P80032, | SLQGGAPNFPQPSQQNGGWQVSP | 2090 |
| | Coleoptericin | DLGRDDKGNTRGQIEIQNKGKDH | |
| | (insect) | DFNAGWGKVIRGPNKAKPTWHVG | |
| | | GTYRR | |
| AP00396 | P80054, PR-39 | RRRPRPPYLPRPRPPPFFPPRLPPRIP | 2091 |
| | (PR39, pig | PGFPPRFPPRFP | |
| | cathelicidin) | | |
| AP00182 | P80154, Insect | GFGCPLDQMQCHRHCQTITGRSGG | 2092 |
| | defensin | YCSGPLKLTCTCYR | |
| AP00444 | P80223, | GICACRRRFCLNFEQFSGYCRVNG | 2093 |
| | Corticostatin VI | ARYVRCCSRR | |
| | (CS-VI) (animal | | |
| | defensin, rabbit) | | |
| AP00208 | P80230, Peptide | RADTQTYQPYNKDWIKEKIYVLLR | 2094 |
| | 3910 (pig) | RQAQQAGK | |
| AP00157 | P80277, | ALWKTMLKKLGTMALHAGKAAL | 2095 |
| | Dermaseptin-S1 | GAAADTISQGTQ | |
| | (Dermaseptin S1, | | |
| | DRS S1, DRS-S1, | | |
| | frog) | | |
| AP00158 | P80278, | ALWFTMLKKLGTMALHAGKAAL | 2096 |
| | Dermaseptin-S2 | GAAANTISQGTQ | |
| | (Dermaseptin S2, | | |
| | DRS S2, DRS-S2, | | |
| | frog) | | |
| AP00159 | P80279, | ALWKNMLKGIGKLAGKAALGAV | 2097 |
| | Dermaseptin-S3 | KKLVGAES | |
| | (Dermaseptin S3, | | |
| | DRS S3, DRS-S3, | | |
| | frog) | | |
| AP00160 | P80280, | ALWMTLLKKVLKAAAKALNAVL | 2098 |
| | Dermaseptin-S4 | VGANA | |
| | (Dermaseptin S4, | | |
| | DRS S4, DRS-S4, | | |
| | frog) | | |
| AP00161 | P80281, | GLWSKIKTAGKSVAKAAAKAAVK | 2099 |
| | Dermaseptin-S5 | AVTNAV | |
| | (Dermaseptin S5, | | |
| | DRS S5, DRS-S5, | | |
| | frog) | | |
| AP00293 | P80282, | AMWKDVLKKIGTVALHAGKAAL | 2100 |
| | Dermaseptin-B1 | GAVADTISQ | |
| | (DRS-B1, DRS B1, | | |
| | frog) | | |
| AP00264 | P80389, Chicken | GRKSDCFRKSGFCAFLKCPSLTLIS | 2101 |
| | Heterophil Peptide | GKCSRFYLCCKRIR | |
| | 1 (CHP1, bird, | | |
| | animal) | | |
| AP00265 | P80390, Chicken | GRKSDCFRKNGFCAFLKCPYLTLIS | 2102 |
| | Heterophil Peptide | GLCSFHLC | |
| | 2 (CHP2, bird, | | |
| | animal) | | |
| AP00266 | P80391, Turkey | GKREKCLRRNGFCAFLKCPTLSVIS | 2103 |
| | Heterophil Peptide | GTCSRFQVCC | |
| | 1 (THP1, turkey) | | |
| AP00267 | P80392, Turkey | LFCKRGTCHFGRCPSHLIKVGSCFG | 2104 |
| | Heterophil Peptide | FRSCCKWPWDA | |
| | 2 (THP2, bird, | | |
| | anaimal) | | |
| AP00269 | P80393, Turkey | LSCKRGTCHFGRCPSHLIKGSCSGG | 2105 |
| | Heterophil Peptide | | |
| | 3 (THP3, bird, | | |
| | animal) | | |
| AP00085 | P80395, Gaegurin- | SLFSLIKAGAKFLGKNLLKQGACY | 2106 |
| | 1 (Gaegurin 1, | AACKASKQC | |
| | frog) | | |
| AP00086 | P80396, Gaegurin- | GIMSIVKDVAKNAAKEAAKGALST | 2107 |
| | 2 (Gaegurin 2, | LSCKLAKTC | |
| | frog) | | |
| AP00087 | P80397, Gaegurin- | GIMSIVKDVAKTAAKEAAKGALST | 2108 |
| | 3 (Gaegurin 3, | LSCKLAKTC | |
| | frog) | | |
| AP00089 | P80399, Gaegurin- | FLGALFKVASKVLPSVFCAITKKC | 2109 |
| | 5 (Gaegurin 5, | | |
| | frog) | | |
| AP00090 | P80400, Gaegurin- | FLPLLAGLAANFLPTIICKISYKC | 2110 |
| | 6 (Gaegurin 6, | | |
| | frog) | | |
| AP00362 | P80408, | VDKPDYRPRPRPPNM | 2111 |
| | Metalnikowin I | | |
| | (insect) | | |
| AP00363 | P80409, | VDKPDYRPRPWPRPN | 2112 |
| | Metalnikowin IIA | | |
| | (insect) | | |
| AP00364 | P80410, | VDKPDYRPRPWPRNMI | 2113 |
| | Metalnikowin IIB | | |
| | (insect) | | |
| AP00365 | P80411, | VDKPDYRPRPWPRPNM | 2114 |
| | Metalnikowin III | | |
| | (insect) | | |
| AP00632 | P80569, Piscicolin | KYYGNGVSCNKNGCTVDWSKAIG | 2115 |
| | 126/Piscicocin | IIGNNAAANLTTGGAAGWNKG | |
| | Via (PiscV1a, | | |
| | Pisc126, class IIA | | |
| | bacteriocin, | | |
| | bacteria) | | |
| AP01003 | P80666, Mutacin | FKSWSFCTPGCAKTGSFNSYCC | 2116 |
| | B-Ny266 (bacteria) | | |
| AP00276 | P80710, Clavanin | VFQFLGKIIHHVGNFVHGFSHVF | 2117 |
| | A (urochordates, | | |
| | sea squirts, and sea | | |
| | pork, tunicate) | | |
| AP00277 | P80711, Clavanin | VFQFLGRIIHHVGNFVHGFSHVF | 2118 |
| | B (Sea squirt, | | |
| | tunicate) | | |
| AP00278 | P80712, Clavanin | VFHLLGKIIHHVGNFVYGFSHVF | 2119 |
| | C (Sea squirt, | | |
| | tunicate) | | |
| AP00279 | P80713, Clavanin | AFKLLGRIIHHVGNFVYGFSHVF | 2120 |
| | D (Sea squirt, | | |
| | tunicate) | | |
| AP00280 | P80713, Clavanin | LFKLLGKIIHHVGNFVHGFSHVF | 2121 |
| | D (Sea squirt, | | |
| | tunicate) | | |
| AP00294 | P80930, eNAP-1 | DVQCGEGHFCHDQTCCRASQGGA | 2122 |
| | (horse) | CCPYSQGVCCADQRHCCPVGF | |
| AP00400 | P80952, Skin | YPPKPESPGEDASPEEMNKYLTAL | 2123 |
| | peptide tyrosine- | RHYINLVTRQRY | |
| | tyrosine (skin- | | |
| | PYY, SPYY, frog) | | |
| AP00091 | P80954, Rugosin A | GLLNTFKDWAISIAKGAGKGVLTT | 2124 |
| | (frog) | LSCKLDKSC | |
| AP00092 | P80955, Rugosin B | SLFSLIKAGAKFLGKNLLKQGAQY | 2125 |
| | (frog) | AACKVSKEC | |
| AP00093 | P80956, Rugosin C | GILDSFKQFAKGVGKDLIKGAAQG | 2126 |
| | (frog) | VLSTMSCKLAKTC | |
| AP00392 | P81056, Penaeidin- | YRGGYTGPIPRPPPIGRPPLRLVVC | 2127 |
| | 1 (shrimp, | ACYRLSVSDARNCCIKFGSCCHLVK | |
| | Crustacea) | | |
| AP00393 | P81057, Penaeidin- | YRGGYTGPIPRPPPIGRPPFRPVCN | 2128 |
| | 2a (shrimp, | ACYRLSVSDARNCCIKFGSCCHLVK | |
| | Crustacea) | | |
| AP00394 | P81058, Penaeidin- | QVYKGGYTRPIPRPPPFVRPLPGGP | 2129 |
| | 3a (shrimp, | IGPYNGCPVSCRGISFSQARSCCSR | |
| | Crustacea) | LGRCCHVGKGYS | |
| AP00247 | P81251, Caerin 1.8 | GLFKVLGSVAKHLLPHVVPVIAEK | 2130 |
| | (frog) | | |
| AP00248 | P81252, Caerin 1.9 | GLFGVLGSIAKHVLPHVVPVIAEK | 2131 |
| | (frog, ZZHa) | | |
| AP00126 | P81417, Cecropin | GGLKKLGKKLEGVGKRVFKASEK | 2132 |
| | A (insect, | ALPVAVGIKALG | |
| | mosquito) | | |
| AP00169 | P81437, Formaecin | GRPNPVNTKPTPYPRL | 2133 |
| | 2 (insect, ants) | | |
| AP00168 | P81438, Formaecin | GRPNPVNNKPTPHPRL | 2134 |
| | 1 (insect, ants) | | |
| AP00296 | P81456, Fabatin-1 | LLGRCKVKSNRFHGPCLTDTHCST | 2135 |
| | (plant defensin) | VCRGEGYKGGDCHGLRRRCMCLC | |
| AP00297 | P81457, Fabatin-2 | LLGRCKVKSNRFNGPCLTDTHCST | 2136 |
| | (plant defensin) | VCRGEGYKGGDCHGLRRRCMCLC | |
| AP01215 | P81463, European | FVPYNPPRPYQSKPFPSFPGHGPFN | 2137 |
| | bumblebee abaecin | PKIQWPYPLPNPGH | |
| | (insect) | | |
| AP01214 | P81464, Apidaecin | GNRPVYIPPPRPPHPRL | 2138 |
| | (insect) | | |
| AP00440 | P81465, defensin | VTCFCRRRGCASRERHIGYCRFGN | 2139 |
| | HANP-1 (hamster) | TIYRLCCRR | |
| AP00441 | P81466, defensin | CFCKRPVCDSGETQIGYCRLGNTF | 2140 |
| | HANP-2 (hamster) | YRLCCRQ | |
| AP00442 | P81467, defensin | VTCFCRRRGCASRERLIGYCRFGN | 2141 |
| | HANP-3 (hamster) | TIYGLCCRR | |
| AP00439 | P81468, defensin | VTCFCKRPVCDSGETQIGYCRLGN | 2142 |
| | HANP-4 (hamster) | TFYRLCCRQ | |
| AP00328 | P81469, Styelin A | GFGKAFHSVSNFAKKHKTA | 2143 |
| | (Sea squirt, | | |
| | tunicate, XXA) | | |
| AP00329 | P81470, Styelin B | GFGPAFHSVSNFAKKHKTA | 2144 |
| | (Sea squirt, | | |
| | tunicate, XXA) | | |
| AP00492 | P81474, Misgurin | RQRVEELSKFSKKGAAARRRK | 2145 |
| | (fish) | | |
| AP00165 | P81485, | ALWKNMLKGIGKLAGQAALGAV | 2146 |
| | Dermaseptin-B3 | KTLVGAE | |
| | (Dermaseptin B3, | | |
| | DRS-B3, DRS B3, | | |
| | frog) | | |
| AP00163 | P81486, | ALWKDILKNVGKAAGKAVLNTVT | 2147 |
| | Dermaseptin-B4 | DMVNQ | |
| | (Dermaseptin B4, | | |
| | DRS-B4, DRS B4, | | |
| | DRS-TR1, IRP, | | |
| | frog) | | |
| AP00162 | P81487, | GLWNKIKEAASKAAGKAALGFVN | 2148 |
| | Dermaseptin-B5 | EMV | |
| | (Dermaseptin B5, | | |
| | DRS-B5, DRS B5, | | |
| | frog) | | |
| AP00164 | P81488, | ALWKTIIKGAGKMIGSLAKNLLGS | 2149 |
| | Dermaseptin-B9 | QAQPES | |
| | (Dermaseptin B9, | | |
| | DRS-B9, DRS | | |
| | DRG3, frog) | | |
| AP00167 | P81565, Phylloxin | GWMSKIASGIGTFLSGMQQ | 2150 |
| | (phylloxin-B1, | | |
| | PLX-B1, XXA, | | |
| | frog) | | |
| AP00291 | P81568, Defensin | MFFSSKKCKTVSKTFRGPCVRNAN | 2151 |
| | D5 (So-D5) (plant | | |
| | defensin) | | |
| AP00290 | P81569, Defensin | MFFSSKKCKTVSKTFRGPCVRNA | 2152 |
| | D4 (So-D4) (plant | | |
| | defensin) | | |
| AP00289 | P81570, Defensin | GIFSSRKCKTVSKTFRGICTRNANC | 2153 |
| | D3 (So-D3) (plant | | |
| | defensin) | | |
| AP00288 | P81572, Defensin | TCESPSHKFKGPCATNRNCES | 2154 |
| | D1 (So-D1) (plant | | |
| | defensin) | | |
| AP00292 | P81573, Defensin | GIFSSRKCKTPSKTFKGYCTRDSNC | 2155 |
| | D7 (So-D7) (plant | DTSCRYEGYPAGD | |
| | defensin) | | |
| AP00270 | P81591, Pn-AMP | QQCGRQASGRLCGNRLCCSQWGY | 2156 |
| | (PnAMP, plant | CGSTASYCGAGCQSQCRS | |
| | defensin) | | |
| AP00412 | P81592, | SLQPGAPNVNNKDQPWQVSPHISR | 2157 |
| | Acaloleptin A1 | DDSGNTRTDINVQRHGENNDFEAG | |
| | (insect) | WSKVVRGPNKAKPTWHIGGTHRW | |
| AP00433 | P81605, human | SSLLEKGLDGAKKAVGGLGKLGK | 2158 |
| | Dermcidin (DCD- | DAVEDLESVGKGAVHDVKDVLDSV | |
| | 1) | | |
| AP00332 | P81612, Mytilin A | GCASRCKAKCAGRRCKGWASASF | 2159 |
| | (Blue mussel) | RGRCYCKCFRC | |
| AP00333 | P81613, Mytilin B | SCASRCKGHCRARRCGYYVSVLY | 2160 |
| | (Blue mussel) | RGRCYCKCLRC | |
| AP00334 | P81613, | FFHHIFRGIVHVGKTIHKLVTG | 2161 |
| | Moronecidin (fish) | | |
| AP00351 | P81835, Citropin | GLFDVIKKVASVIGGL | 2162 |
| | 1.1 (amphibian, | | |
| | frog) | | |
| AP00352 | P81840, Citropin | GLFDIIKKVASVVGGL | 2163 |
| | 1.2 (amphibian, | | |
| | frog) | | |
| AP00353 | P81846, Citropin | GLFDIIKKVASVIGGL | 2164 |
| | 1.3 (amphibian, | | |
| | frog) | | |
| AP00338 | P81903, Histone | PDPAKTAPKKGSKKAVTKA | 2165 |
| | H2B-1(HLP-1) | | |
| | (fish) | | |
| AP00271 | P82018, ChBac5 | RFRPPIRRPPIRPPFNPPFRPPVRPPF | 2166 |
| | (Goat cathelicidin) | RPPFRPPFRPPIGPFP | |
| AP00316 | P82027, Uperin 2.1 | GIVDFAKKVVGGIRNALGI | 2167 |
| | (amphibian, toad) | | |
| AP00317 | P82028, Uperin 2.2 | GFVDLAKKVVGGIRNALGI | 2168 |
| | (amphibian, toad) | | |
| AP00318 | P82029, Uperin 2.3 | GFFDLAKKVVGGIRNALGI | 2169 |
| | (amphibian, toad) | | |
| AP00319 | P82030, Uperin 2.4 | GILDFAKTVVGGIRNALGI | 2170 |
| | (amphibian, toad) | | |
| AP00320 | P82031, Uperin 2.5 | GIVDFAKGVLGKIKNVLGI | 2171 |
| | (amphibian, toad) | | |
| AP00323 | P82032, Uperin 3.1 | GVLDAFRKIATVVKNVV | 2172 |
| | (amphibian, toad) | | |
| AP00326 | P82035, Uperin 4.1 | GVGSFIHKVVSAIKNVA | 2173 |
| | (amphibian, toad) | | |
| AP00321 | P82039, Uperin 2.7 | GIIDIAKKLVGGIRNVLGI | 2174 |
| | (amphibian, toad) | | |
| AP00322 | P82040, Uperin 2.8 | GILDVAKTLVGKLRNVLGI | 2175 |
| | (amphibian, toad) | | |
| AP00324 | P82042, Uperin 3.5 | GVGDLIRKAVSVIKNIV | 2176 |
| | (amphibian, toad) | | |
| AP00325 | P82042, Uperin 3.6 | GVIDAAKKVVNVLKNLP | 2177 |
| | (amphibian, toad) | | |
| AP00327 | P82050, Uperin 7.1 | GWFDVVKHIASAV | 2178 |
| | (amphibian, frog) | | |
| AP00260 | P82066, Maculatin | GLFVGVLAKVAAHVVPAIAEHF | 2179 |
| | 1.1 (XXA, frog, | | |
| | ZZHa) | | |
| AP00261 | P82067, Maculatin | GLFVGLAKVAAHNNPAIAEHFQA | 2180 |
| | 1.2 (XXA, frog) | | |
| AP00262 | P82068, Maculatin | GFVDFLKKVAGTIANVVT | 2181 |
| | 2.1 (frog) | | |
| AP00263 | P82069, Maculatin | GLLQTIKEKLESLESLAKGIVSGIQA | 2182 |
| | 3.1 (frog) | | |
| AP00345 | P82104, Caerin | GLLSVLGSVAKHVLPHVVPVIAEKL | 2183 |
| | 1.10 (frog) | | |
| AP00456 | P82232, Brevinin- | VNPIILGVLPKFVCLITKKC | 2184 |
| | 1T (frog) | | |
| AP00459 | P82233, Brevinin- | FITLLLRKFICSITKKC | 2185 |
| | 1TA (frog) | | |
| AP00457 | P82234, Brevinin- | GLWETIKNFGKKFTLNILHKLKCKI | 2186 |
| | 2TC (frog) | GGGC | |
| AP00458 | P82235, Brevinin- | GLWETIKNFGKKFTLNILHNLKCKI | 2187 |
| | 2TD (frog) | GGGC | |
| AP00397 | P82238, | SGFVLKGYTKTSQ | 2188 |
| | Salmocidin 2A | | |
| | (fish, trout) | | |
| AP00398 | P82239, | AGFVLKGYTKTSQ | 2189 |
| | Salmocidin 2B | | |
| | (fish, trout) | | |
| AP00055 | P82282, Bombinin | IIGPVLGMVGSALGGLLKKI | 2190 |
| | H1 (frog) | | |
| AP00056 | P82284, Bombinin | LIGPVLGLVGSALGGLLKKI | 2191 |
| | H4 (frog, XXA, | | |
| | XXD) | | |
| AP00057 | P82285, Bombinin | IIGPVLGLVGSALGGLLKKI | 2192 |
| | H5 (frog, XXD) | | |
| AP00419 | P82286, Bombinin- | GIGASILSAGKSALKGFAKGLAEHF | 2193 |
| | like peptides 2 | AN | |
| | (amphibian, toad) | | |
| AP00137 | P82293, Cryptdin-1 | LRDLVCYCRTRGCKRRERMNGTC | 2194 |
| | (Crp1, animal | RKGHLMYTLCCR | |
| | defensin, alpha, | | |
| | mouse) | | |
| AP00443 | P82317, defensin | ACYCRIPACLAGERRYGTCFYMGR | 2195 |
| | RMAD-2 (monkey) | VWAFCC | |
| AP00012 | P82386, Aurein 1.1 | GLFDIIKKIAESI | 2196 |
| | (amphibian, frog) | | |
| AP00014 | P82388, Aurein 2.1 | GLLDIVKKVVGAFGSL | 2197 |
| | (amphibian, frog) | | |
| AP00015 | P82389, Aurein 2.2 | GLFDIVKKVVGALGSL | 2198 |
| | (amphibian, frog) | | |
| AP00016 | P82390, Aurein 2.3 | GLFDIVKKVVGAIGSL | 2199 |
| | (XXA, | | |
| | amphibian, frog) | | |
| AP00017 | P82391, Aurein 2.4 | GLFDIVKKVVGTIAGL | 2200 |
| | (XXA, | | |
| | amphibian, frog) | | |
| AP00018 | P82392, Aurein 2.5 | GLFDIVKKVVGAFGSL | 2201 |
| | (XXA, | | |
| | amphibian, frog) | | |
| AP00019 | P82393, Aurein 2.6 | GLFDIAKKVIGVIGSL | 2202 |
| | (XXA, | | |
| | amphibian, frog) | | |
| AP00020 | P82394, Aurein 3.1 | GLFDIVKKIAGHIAGSI | 2203 |
| | (XXA, | | |
| | amphibian, frog) | | |
| AP00021 | P82395, Aurein 3.2 | GLFDIVKKIAGHIASSI | 2204 |
| | (XXA, | | |
| | amphibian, frog) | | |
| AP00022 | P82396, Aurein 3.3 | GLFDIVKKIAGHIVSSI | 2205 |
| | (XXA, | | |
| | amphibian, frog) | | |
| AP00376 | P82414, Ponericin | GWKDWAKKAGGWLKKKGPGMA | 2206 |
| | G1 (ants) | KAALKAAMQ | |
| AP00377 | P82415, Ponericin | GWKDWLKKGKEWLKAKGPGIVK | 2207 |
| | G2 (ants) | AALQAATQ | |
| AP00378 | P82416, Ponericin | GWKDWLNKGKEWLKKKGPGIMK | 2208 |
| | G3 (ants) | AALKAATQ | |
| AP00379 | P82417, Ponericin | DFKDWMKTAGEWLKKKGPGILKA | 2209 |
| | G4 (ants) | AMAAAT | |
| AP00380 | P82418, Ponericin | GLKDWVKIAGGWLKKKGPGILKA | 2210 |
| | G5 (ants) | AMAAATQ | |
| AP00381 | P82419, Ponericin | GLVDVLGKVGGLIKKLLP | 2211 |
| | G6 (ants) | | |
| AP00382 | P82420, Ponericin | GLVDVLGKVGGLIKKLLPG | 2212 |
| | G7 (ants) | | |
| AP00383 | P82421, Ponericin | LLKELWTKMKGAGKAVLGKIKGLL | 2213 |
| | L1 (ants) | | |
| AP00384 | P82422, Ponericin | LLKELWTKIKGAGKAVLGKIKGLL | 2214 |
| | L2 (ants) | | |
| AP00386 | P82423, Ponericin | WLGSALKIGAKLLPSVVGLFKKKKQ | 2215 |
| | W1 (ants) | | |
| AP00387 | P82424, Ponericin | WLGSALKIGAKLLPSVVGLFQKKKK | 2216 |
| | W2 (ants) | | |
| AP00388 | P82425, Ponericin | GIWGTLAKIGIKAVPRVISMLKKK | 2217 |
| | W3 (ants) | KQ | |
| AP00389 | P82426, Ponericin | GIWGTALKWGVKLLPKLVGMAQT | 2218 |
| | W4 (ants) | KKQ | |
| AP00390 | P82427, Ponericin | FWGALIKGAAKLIPSVVGLFKKKQ | 2219 |
| | W5 (ants) | | |
| AP00391 | P82428, Ponericin | FIGTALGIASAIPAIVKLFK | 2220 |
| | W6 (ants) | | |
| AP00303 | P82651, Tigerinin- | FCTMIPIPRCY | 2221 |
| | 1 (frog) | | |
| AP00304 | P82652, Tigerinin- | RVCFAIPLPICH | 2222 |
| | 2 (frog) | | |
| AP00305 | P82653, Tigerinin- | RVCYAIPLPICY | 2223 |
| | 3 (frog) | | |
| AP00301 | P82656, Hadrurin | GILDTIKSIASKVWNSKTVQDLKR | 2224 |
| | (scorpion) | KGINWVANKLGVSPQAA | |
| AP00113 | P82740, | GLLSGLKKVGKHVAKNVAVSLMD | 2225 |
| | RANATUERIN 1T | SLKCKISGDC | |
| | (frog) | | |
| AP00114 | P82741, | SMLSVLKNLGKVGLGFVACKINK | 2226 |
| | RANATUERIN 1 | QC | |
| | (Ranatuerin-1, | | |
| | frog) | | |
| AP00115 | P82742, | GLFLDTLKGAAKDVAGKLEGLKC | 2227 |
| | RANATUERIN 2 | KITGCKLP | |
| | (Ranatuerin-2, | | |
| | frog) | | |
| AP00116 | P82780, | GFLDIINKLGKTFAGHMLDKIKCTI | 2228 |
| | RANATUERIN 3 | GTCPPSP | |
| | (Ranatuerin-3, | | |
| | frog) | | |
| AP00117 | P82819, | FLPFIARLAAKVFPSIICSVTKKC | 2229 |
| | RANATUERIN 4 | | |
| | (Ranatuerin-4, | | |
| | frog) | | |
| AP00405 | P82821, | FISAIASMLGKFL | 2230 |
| | RANATUERIN 6 | | |
| | (frog) | | |
| AP00406 | P82822, | FLSAIASMLGKFL | 2231 |
| | RANATUERIN 7 | | |
| | (frog) | | |
| AP00407 | P82823, | FISAIASFLGKFL | 2232 |
| | RANATUERIN 8 | | |
| | (frog) | | |
| AP00408 | P82824, | FLFPLITSFLSKVL | 2233 |
| | RANATUERIN 9 | | |
| | (frog) | | |
| AP00461 | P82825, Brevinin- | FLPMLAGLAASMVPKLVCLITKKC | 2234 |
| | 1LA (frog) | | |
| AP00462 | P82826, Brevinin- | FLPMLAGLAASMVPKFVCLITKKC | 2235 |
| | 1LB (frog) | | |
| AP00118 | P82828, | GILDSFKGVAKGVAKDLAGKLLD | 2236 |
| | RANATUERIN | KLKCKITGC | |
| | 2La (Ranatuerin- | | |
| | 2La, frog) | | |
| AP00119 | P82829, | GILSSIKGVAKGVAKNVAAQLLDT | 2237 |
| | RANATUERIN | LKCKITGC | |
| | 2Lb (Ranatuerin- | | |
| | 2Lb, frog) | | |
| AP00109 | P82830, Temporin- | VLPLISMALGKLL | 2238 |
| | 1La (Temporin | | |
| | 1La, frog) | | |
| AP00110 | P82831, Temporin- | NFLGTLINLAKKIM | 2239 |
| | 1Lb (Temporin | | |
| | 1Lb, frog) | | |
| AP00111 | P82832, Temporin- | FLPILINLIHKGLL | 2240 |
| | 1Lc (Temporin | | |
| | 1Lc, frog) | | |
| AP00463 | P82833, Brevinin- | FLPFIAGMAAKFLPKIFCAISKKC | 2241 |
| | 1BA (frog) | | |
| AP00464 | P82834, Brevinin- | FLPAIAGMAAKFLPKIFCAISKKC | 2242 |
| | 1BB (frog) | | |
| AP00465 | P82835, Brevinin- | FLPFIAGVAAKFLPKIFCAISKKC | 2243 |
| | 1BC (frog) | | |
| AP00466 | P82836, Brevinin- | FLPAIAGVAAKFLPKIFCAISKKC | 2244 |
| | 1BD (frog) | | |
| AP00467 | P82837, Brevinin- | FLPAIVGAAAKFLPKIFCVISKKC | 2245 |
| | 1BE (frog) | | |
| AP00468 | P82838, Brevinin- | FLPFIAGMAANFLPKIFCAISKKC | 2246 |
| | 1BF (frog) | | |
| AP00120 | P82840, | GLLDTIKGVAKTVAASMLDKLKC | 2247 |
| | RANATUERIN 2B | KISGC | |
| | (Ranatuerin-2B, | | |
| | frog) | | |
| AP00469 | P82841, Brevinin- | FLPIIAGVAAKVFPKIFCAISKKC | 2248 |
| | 1PA (frog) | | |
| AP00460 | P82842, Brevinin- | FLPIIAGIAAKVFPKIFCAISKKC | 2249 |
| | 1PB (frog) | | |
| AP00470 | P82843, Brevinin- | FLPIIASVAAKVFSKIFCAISKKC | 2250 |
| | 1PC (frog) | | |
| AP00471 | P82844, Brevinin- | FLPIIASVAANVFSKIFCAISKKC | 2251 |
| | 1PD (frog) | | |
| AP00472 | P82845, Brevinin- | FLPIIASVAAKVFPKIFCAISKKC | 2252 |
| | 1PE (frog) | | |
| AP00121 | P82847, | GLMDTVKNVAKNLAGHMLDKLK | 2253 |
| | RANATUERIN 2P | CKITGC | |
| | (Ranatuerin-2P, | | |
| | frog) | | |
| AP00112 | P82848, Temporin- | FLPIVGKLLSGLL | 2254 |
| | 1P (Temporin 1P, | | |
| | frog) | | |
| AP00452 | P82871, Brevinin- | FLPVVAGLAAKVLPSIICAVTKKC | 2255 |
| | 1SY (frog) | | |
| AP00122 | P82875, | SMLSVLKNLGKVGLGLVACKINK | 2256 |
| | Ranatuerin-1C | QC | |
| | (Ranatuerin 1C, | | |
| | frog) | | |
| AP00514 | P82876, Ranalexin- | FLGGLMKAFPALICAVTKKC | 2257 |
| | 1Ca (frog) | | |
| AP00515 | P82877, Ranalexin- | FLGGLMKAFPAIICAVTKKC | 2258 |
| | 1Cb (frog) | | |
| AP00124 | P82878, | GLFLDTLKGAAKDVAGKLLEGLK | 2259 |
| | Ranatuerin-2Ca | CKIAGCKP | |
| | (Ranatuerin 2Ca, | | |
| | frog) | | |
| AP00123 | P82879, | GLFLDTLKGLAGKLLQGLKCIKAG | 2260 |
| | Ranatuerin-2Cb | CKP | |
| | (Ranatuerin 2Cb, | | |
| | frog) | | |
| AP00104 | P82880, Temporin- | FLPFLAKILTGVL | 2261 |
| | 1Ca (Temporin | | |
| | 1Ca, frog) | | |
| AP00105 | P82881, Temporin- | FLPLFASLIGKLL | 2262 |
| | 1Cb (Temporin | | |
| | 1Cb, frog) | | |
| AP00106 | P82882, Temporin- | FLPFLASLLTKVL | 2263 |
| | 1Cc (Temporin | | |
| | 1Cc, frog) | | |
| AP00107 | P82883, Temporin- | FLPFLASLLSKVL | 2264 |
| | 1Cd (Temporin | | |
| | 1Cd, frog) | | |
| AP00108 | P82884, Temporin- | FLPFLATLLSKVL | 2265 |
| | 1Ce (Temporin | | |
| | 1Ce, frog) | | |
| AP00453 | P82904, Brevinin- | FLPAIVGAAGQFLPKIFCAISKKC | 2266 |
| | 1SA (frog) | | |
| AP00454 | P82905, Brevinin- | FLPAIVGAAGKFLPKIFCAISKKC | 2267 |
| | 1SB (frog) | | |
| AP00455 | P82906, Brevinin- | FFPIVAGVAGQVLKKIYCTISKKC | 2268 |
| | 1SC (frog) | | |
| AP00996 | P82907, Lichenin | ISLEICAIFHDN | 2269 |
| | (bacteria) | | |
| AP00302 | P82951, Hepcidin | GCRFCCNCCPNMSGCGVCCRF | 2270 |
| | (fish) | | |
| AP00058 | P83080, Maximin 1 | GIGTKILGGVKTALKGALKELAST | 2271 |
| | (toad) | YAN | |
| AP00059 | P83081, Maximin 2 | GIGTKILGGVKTALKGALKELAST | 2272 |
| | (toad) | YVN | |
| AP00060 | P83082, Maximin 3 | GIGGKILSGLKTALKGAAKELAST | 2273 |
| | (toad, ZZHa) | YLH | |
| AP00061 | P83083, Maximin 4 | GIGGVLLSAGKAALKGLAKVLAE | 2274 |
| | (toad) | KYAN | |
| AP00062 | P83084, Maximin 5 | SIGAKILGGVKTFFKGALKELASTY | 2275 |
| | (toad) | LQ | |
| AP00063 | P83085, Maximin 6 | ILGPVISTIGGVLGGLLKNL | 2276 |
| | (toad) | | |
| AP00064 | P83086, Maximin 7 | ILGPVLGLVGNALGGLIKNE | 2277 |
| | (toad) | | |
| AP00065 | P83087, Maximin 8 | ILGPVLSLVGNALGGLLKNE | 2278 |
| | (toad) | | |
| AP00355 | P83171, | ANTAFVSSAHNTQKIPAGAPFNRN | 2279 |
| | Ginkbilobin | LRAMLADLRQNAAFAG | |
| | (Chinese plant) | | |
| AP00475 | P83188, Pseudin 1 | GLNTLKKVFQGLHEAIKLINNHVQ | 2280 |
| | (frog) | | |
| AP00476 | P83189, Pseudin 2 | GLNALKKVFQGIHEAIKLINNHVQ | 2281 |
| | (frog) | | |
| AP00477 | P83190, Pseudin 3 | GINTLKKVIQGLHEVIKLVSNHE | 2282 |
| | (frog) | | |
| AP00478 | P83191, Pseudin 4 | GINTLKKVIQGLHEVIKLVSNHA | 2283 |
| | (frog) | | |
| AP00410 | P83287, | SKGKKANKDVELARG | 2284 |
| | Oncorhyncin III | | |
| | (fish) | | |
| AP00357 | P83305, Japonicin- | FFPIGVFCKIFKTC | 2285 |
| | 1 (amphibian, frog) | | |
| AP00358 | P83306, Japonicin- | FGLPMLSILPKALCILLKRKC | 2286 |
| | 2 (amphibian, frog) | | |
| AP00385 | P83312, | FKLGSFLKKAWKSKLAKKLRAKG | 2287 |
| | Parabutoporin | KEMLKDYAKGLLEGGSEEVPGQ | |
| | (scorpion) | | |
| AP00374 | P83313, | GKVWDWIKSTAKKLWNSEPVKEL | 2288 |
| | Opistoporin 1 | KNTALNAAKNLVAEKIGATPS | |
| | (scorpion) | | |
| AP00375 | P83314, | GKVWDWIKSTAKKLWNSEPVKEL | 2289 |
| | Opistoporin 2 | KNTALNAAKNFVAEKIGATPS | |
| | (scorpion) | | |
| AP00336 | P83327, Histone | AERVGAGAPVYL | 2290 |
| | H2A (fish) | | |
| AP00335 | P83338, Histone | PKRKSATKGDEPA | 2291 |
| | H6-like protein | | |
| | (fish) | | |
| AP00411 | P83374, | KAVAAKKSPKKAKKPAT | 2292 |
| | Oncorhyncin II | | |
| | (fish) | | |
| AP00999 | P83375, Serracin-P | DYHHGVRVL | 2293 |
| | 43 kDa subunit | | |
| | (bacteria) | | |
| AP00284 | P83376, | SHQDCYEALHKCMASHSKPFSCS | 2294 |
| | Dolabellanin B2 | MKFHMCLQQQ | |
| | (sea hare) | | |
| AP00998 | P83378, Serracin-P | ALPKKLKYLNLFNDGFNYMGVV | 2295 |
| | 23 kDa subunit | | |
| | (bacteriocin, | | |
| | bacteria) | | |
| AP00129 | P83403, Cecropin | GWLKKIGKKIERVGQNTRDATVK | 2296 |
| | (insect, moth) | GLEVAQQAANVAATVR | |
| AP00127 | P83413, Cecropin | RWKVFKKIEKVGRNIRDGVIKAAP | 2297 |
| | A (insect, moth) | AIEVLGQAKAL | |
| AP00372 | P83416, Virescein | GKIPIGAIKKAGKAIGKGLRAVNIA | 2298 |
| | (insect) | STAHDVYTFFKPKKRH | |
| AP00356 | P83427, Heliocin | QRFIHPTYRPPPQPRRPVIMRA | 2299 |
| | (insect) | | |
| AP00409 | P83428, Locustin | ATTGCSCPQCIIFDPICASSYKNGRR | 2300 |
| | (insect) | GFSSGCHMRCYNRCHGTDYFQISK | |
| | | GSKCI | |
| AP00339 | P83545, | FFGWLIKGAIHAGKAIHGLIHRRRH | 2301 |
| | Chrysophsin-1 | | |
| | (Red sea bream, | | |
| | madai) | | |
| AP00340 | P83546, | FFGWLIRGAIHAGKAIHGLIHRRRH | 2302 |
| | Chrysophsin-2 | | |
| | (Red sea bream, | | |
| | madai) | | |
| AP00341 | P83547, | FIGLLISAGKAIHDLIRRRH | 2303 |
| | Chrysophsin-3 | | |
| | (Red sea bream, | | |
| | madai) | | |
| AP01004 | P84763, Thuricin-S | DWTAWSALVAAACSVELL | 2304 |
| | (bacteria) | | |
| AP00553 | P84868, Sesquin | KTCENLADTY | 2305 |
| | (plant, ZZHp) | | |
| AP00132 | Q06589, Cecropin | GWLKKIGKKIERVGQHTRDATIQTI | 2306 |
| | 1 (insect, fly) | AVAQQAANVAATAR | |
| AP00135 | Q06590, Cecropin | GWLKKIGKKIERVGQHTRDATIQTI | 2307 |
| | 2 (insect fly) | GVAQQAANVAATLK | |
| AP00416 | Q17313, | SLGGVISGAKKVAKVAIPIGKAVLP | 2308 |
| | Ceratotoxin C | VVAKLVG | |
| | (insect, fly) | | |
| AP00171 | Q24395, | HRHQGPIFDTRPSPFNPNQPRPGPIY | 2309 |
| | Metchnikowin | | |
| | (insect) | | |
| AP00354 | Q27023, Tenecin 1 | VTCDILSVEAKGVKLNDAACAAH | 2310 |
| | (insect) | CLFRGRSGGYCNGKRVCVCR | |
| AP00401 | Q28880, Lingual | GFTQGVRNSQSCRRNKGICVPIRCP | 2311 |
| | antimicrobial | GSMRQIGTCLGAQVKCCRRK | |
| | peptide (LAP, beta | | |
| | defensin, cow) | | |
| AP00224 | Q62713, RatNP-3 | CSCRTSSCRFGERLSGACRLNGRIY | 2312 |
| | (rat) | RLCC | |
| AP00225 | Q62714, RatNP-4 | ACYCRIGACVSGERLTGACGLNGR | 2313 |
| | (rat) | IYRLCCR | |
| AP00223 | Q62715, RatNP-2 | VTCYCRSTRCGFRERLSGACGYRG | 2314 |
| | (rat) | RIYRLCCR | |
| AP00222 | Q62716, RatNP-1 | VTCYCRRTRCGFRERLSGACGYRG | 2315 |
| | (rat) | RIYRLCCR | |
| AP00174 | Q64365, GNCP-1 | RRCICTTRTCRFPYRRLGTCIFQNR | 2316 |
| | (Guinea pig | VYTFCC | |
| | neutrophil cationic | | |
| | peptide 1) | | |
| AP00311 | Q90W78, Galensin | CYSAAKYPGFQEFINRKYKSSRF | 2317 |
| | (frog) | | |
| AP00395 | Q95NT0, | HSSGYTRPLPKPSRPIFIRPIGCDVC | 2318 |
| | Penaeidin-4a | YGIPSSTARLCCFRYGDCCHR | |
| | (shrimp, Crustacea) | | |
| AP00423 | Q962B0, | QGYKGPYTRPILRPYVRPVVSYNA | 2319 |
| | Penaeidin-3n | CTLSCRGITTTQARSCSTRLGRCCH | |
| | (shrimp, Crustacea) | VAKGYS | |
| AP00422 | Q962B1, | QGCKGPYTRPILRPYVRPVVSYNA | 2320 |
| | Penaeidin-3m | CTLSCRGITTTQARSCCTRLGRCCH | |
| | (shrimp, Crustacea) | VAKGYS | |
| AP00421 | Q963C3, | YSSGYTRPLPKPSRPIFIRPIGCDVC | 2321 |
| | Penaeidin-4C | YGIPSSTARLCCFRYGDCCHR | |
| | (shrimp, Crustacea) | | |
| AP00210 | Q99134, PGLa | GMASKAGAIAGKIAKVALKAL | 2322 |
| | (African clawed | | |
| | frog, XXA) | | |
| AP00054 | Q9DET7, | GIGGALLSAGKSALKGLAKGLAEH | 2323 |
| | Bombinin-like | FAN | |
| | peptide 7 (BLP-7, | | |
| | toad) | | |
| AP00315 | Q9PT75, | SLGSFLKGVGTTLASVGKVVSDQF | 2324 |
| | Dermatoxin (Two- | GKLLQAGQ | |
| | colored leaf frog) | | |
| AP00133 | Q9Y0Y0, Cecropin | GGLKKLGKKLEGVGKRVFKASEK | 2325 |
| | B (insect, | ALPVLTGYKAIG | |
| | mosquito) | | |
| AP00004 | Ref, Ct-AMP1 | NLCERASLTWTGNCGNTGHCDTQ | 2326 |
| | (CtAMP1, C. | CRNWESAKHGACHKRGNWKCFC | |
| | ternatea- | YFDC | |
| | antimicrobial | | |
| | peptide 1, plant | | |
| | defensin) | | |
| AP00027 | Ref, hexapeptide | RRWQWR | 2327 |
| | (synthetic) | | |
| AP00529 | Ref, Lantibiotic | WKSESVCTPGCVTGVLQTCFLQTI | 2328 |
| | Ericin S (bacteria) | TCNCHISK | |
| AP00306 | Ref, Tigerinin-4 | RVCYAIPLPIC | 2329 |
| | (frog) | | |
| AP00309 | Ref, Human KS-27 | KSKEKIGKEFKRIVQRIKDFLRNLV | 2330 |
| | (KS27 from LL-37) | PR | |
| AP00344 | Ref, Apidaecin II | GNNRPIYIPQPRPPHPRL | 2331 |
| | (honeybee, insect) | | |
| AP00424 | Ref, XT1 (frog) | GFLGPLLKLAAKGVAKVIPHLIPSR | 2332 |
| | | QQ | |
| AP00425 | Ref, XT 2 (frog) | GCWSTVLGGLKKFAKGGLEAIVNPK | 2333 |
| AP00426 | Ref, XT 4 (frog) | GVFLDALKKFAKGGMNAVLNPK | 2334 |
| AP00427 | Ref, XT 7 (frog) | GLLGPLLKIAAKVGSNLL | 2335 |
| AP00431 | Ref, human LLP 1 | RVIEVVQGACRAIRHIPRRIRQGLE | 2336 |
| | | RIL | |
| AP00432 | Ref, human LLP | RIAGYGLRGLAVIIRICIRGLNLIFEI | 2337 |
| | | IR | |
| AP00447 | Ref, Anoplin | GLLKRIKTLL | 2338 |
| | (insect) | | |
| AP00474 | Ref, Piscidin 3 | FIHHIFRGIVHAGRSIGRFLTG | 2339 |
| | (fish) | | |
| AP00481 | Ref, Kaliocin-1 | FFSASCVPGADKGQFPNLCRLCAG | 2340 |
| | (synthetic) | TGENKCA | |
| AP00482 | Ref, Thionin | KSCCRNTWARNCYNVCRLPGTISR | 2341 |
| | mutation | EICAKKCRCKIISGTTCPSDYPK | |
| | (synthetic) | | |
| AP00484 | Ref, Stomoxyn | RGFRKHFNKLVKKVKHTISETAHV | 2342 |
| | (insect, fly) | AKDTAVIAGSGAAVVAAT | |
| AP00486 | Ref, Cupiennin 1b | GFGSLFKFLAKKVAKTVAKQAAK | 2343 |
| | (spider) | QGAKYIANKQME | |
| AP00487 | Ref, Cupiennin 1c | GFGSLFKFLAKKVAKTVAKQAAK | 2344 |
| | (spider) | QGAKYIANKQTE | |
| AP00488 | Ref, Cupiennin 1D | GFGSLFKFLAKKVAKTVAKQAAK | 2345 |
| | (spider) | QGAKYVANKHME | |
| AP00489 | Ref, Hipposin | SGRGKTGGKARAKAKTRSSRAGL | 2346 |
| | (fish) | QFPVGRVHRLLRKGNYAHRVGAG | |
| | | APVYL | |
| AP00923 | Ref, | AISYGNGVYCNKEKCWVNKAENK | 2347 |
| | Carnobacteriocin | QAITGIVIGGWASSLAGMGH | |
| | B1 (XXO, class IIa | | |
| | bacteriocin, | | |
| | bacteria) | | |
| AP00496 | Ref, HP 2-20 | AKKVFKRLEKLFSKIQNDK | 2348 |
| | (synthetic) | | |
| AP00497 | Ref, Maximin H5 | ILGPVLGLVSDTLDDVLGIL | 2349 |
| | (toad) | | |
| AP00498 | Ref, rCRAMP (rat | GLVRKGGEKFGEKLRKIGQKIKEF | 2350 |
| | cathelicidin) | FQKLALEIEQ | |
| AP00500 | Ref, S9-P18 | KWKLFKKISKFLHLAKKF | 2351 |
| | (synthetic) | | |
| AP00501 | Ref, L9-P18 | KWKLFKKILKFLHLAKKF | 2352 |
| | (synthetic) | | |
| AP00502 | Ref, Clavaspirin | FLRFIGSVIHGIGHLVHHIGVAL | 2353 |
| | (sea squirt, | | |
| | tunicate) | | |
| AP00503 | Ref, human P- | AKRHHGYKRKFH | 2354 |
| | 113D | | |
| AP00504 | Ref, human MUC7 | LAHQKPFIRKSYKCLHKRCR | 2355 |
| | 20-Mer | | |
| AP00507 | Ref, Nigrocin 2 | GLLSKVLGVGKKVLCGVSGLC | 2356 |
| | (frog) | | |
| AP00508 | Ref, Nigrocin 1 | GLLDSIKGMAISAGKGALQNLLKV | 2357 |
| | (frog) | ASCKLDKTC | |
| AP00509 | Ref, human | VAIALKAAHYHTHKE | 2358 |
| | Calcitermin | | |
| AP00510 | Ref, Dicynthaurin | ILQKAVLDCLKAAGSSLSKAAITAI | 2359 |
| | (sea peach) | YNKIT | |
| AP00511 | Ref, KIGAKI | KIGAKIKIGAKIKIGAKI | 2360 |
| | (synthetic) | | |
| AP00516 | Ref, Lycotoxin I | IWLTALKFLGKHAAKHLAKQQLS | 2361 |
| | (spider) | KL | |
| AP00517 | Ref, Lycotoxin II | KIKWFKTMKSIAKFIAKEQMKKHL | 2362 |
| | (spider) | GGE | |
| AP00518 | Ref, Ib-AMP3 | QYRHRCCAWGPGRKYCKRWC | 2363 |
| | (plant defensin, | | |
| | balsam) | | |
| AP00519 | Ref, Ib-AMP4 | EWGRRCCGWGPGRRYCRRWC | 2364 |
| | (plant defensin, | | |
| | balsam) | | |
| AP00521 | Ref, Dhvar4 | KRLFKKLLFSLRKY | 2365 |
| | (synthetic) | | |
| AP00522 | Ref, Dhvar5 | LLLFLLKKRKKRKY | 2366 |
| | (synthetic) | | |
| AP00525 | Ref, Maximin H2 | ILGPVLSMVGSALGGLIKKI | 2367 |
| | (toad) | | |
| AP00526 | Ref, Maximin H3 | ILGPVLGLVGNALGGLIKKI | 2368 |
| | (toad) | | |
| AP00527 | Ref, Maximin H4 | ILGPVISKIGGVLGGLLKNL | 2369 |
| | (toad) | | |
| AP00528 | Ref, Anionic | DDDDDD | 2370 |
| | peptide SAAP | | |
| | (sheep) | | |
| AP00530 | Ref, Lantibiotic | VLSKSLCTPGCITGPLQTCYLCFPT | 2371 |
| | Ericin A (bacteria) | FAKC | |
| AP00531 | Ref, Kenojeinin I | GKQYFPKVGGRLSGKAPLAAKTH | 2372 |
| | (sea skate) | RRLKP | |
| AP00532 | Ref, Lunatusin | KTCENLADTFRGPCFATSNC | 2373 |
| | (plant, ZZHp) | | |
| AP00533 | Ref, Fallaxin (frog) | GVVDILKGAAKDIAGHLASKVMN | 2374 |
| | | KL | |
| AP00534 | Ref, Tu-AMP 2 | KSCCRNTTARNCYNVCRIPG | 2375 |
| | (TuAMP2, thionin- | | |
| | like antimicrobial | | |
| | peptides, plant | | |
| | defensin, tulip) | | |
| AP00535 | Ref, Pilosulin 1 | GLGSVFGRLARILGRVIPKVAKKL | 2376 |
| | (Myr b I) | GPKVAKVLPKVMKEAIPMAVEMA | |
| | (Australian ants) | KSQEEQQPQ | |
| AP00536 | Ref, Luxuriosin | SVRTQDNAVNRQIFGSNGPYRDFQ | 2377 |
| | (insect) | LSDCYLPLETNPYCNEWQFAYHW | |
| | | NNALMDCERAIYHGCNRTRNNFIT | |
| | | LTACKNQAGPICNRRRH | |
| AP00537 | Ref, SAMP H1 | AEVAPAPAAAAPAKAPKKKAAAK | 2378 |
| | (fish, Atlantic | PKKAGPS | |
| | salmon) | | |
| AP00538 | Ref, Halocidin | WLNALLHHGLNCAKGVLA | 2379 |
| | (dimer Hal18 + | | |
| | Hal15) (tunicate) | | |
| AP00539 | Ref, AOD | GFGCPWNRYQCHSHCRSIGRLGGY | 2380 |
| | (American oyster | CAGSLRLTCTCYRS | |
| | defensin, animal | | |
| | defensin) | | |
| AP00540 | Ref, Pentadactylin | GLLDTLKGAAKNVVGSLASKVME | 2381 |
| | (frog) | KL | |
| AP00541 | Ref, Polybia-MPI | IDWKKLLDAAKQIL | 2382 |
| | (insect, social | | |
| | wasp) | | |
| AP00542 | Ref, Polybia-CP | ILGTILGLLKSL | 2383 |
| | (insect, social | | |
| | wasp) | | |
| AP00543 | Ref, Ocellatin-1 | GVVDILKGAGKDLLAHLVGKISEKV | 2384 |
| | (XXA, frog) | | |
| AP00544 | Ref, Ocellatin-2 | GVLDIFKDAAKQILAHAAEKQI | 2385 |
| | (XXA, frog) | | |
| AP00545 | Ref, Ocellatin-3 | GVLDILKNAAKNILAHAAEQI | 2386 |
| | (frog) | | |
| AP00548 | Ref, CMAP 27 | RFGRFLRKIRRFRPKVTITIQGSARFG | 2387 |
| | (chicken myeloid | | |
| | antimicrobial | | |
| | peptide 27, bird | | |
| | cathelicidin, | | |
| | chicken | | |
| | cathelicidin) | | |
| AP00550 | Ref, Tu-AMP-1 | KSCCRNTVARNCYNVCRIPGTPRP | 2388 |
| | (TuAMP1, thionin- | VCAATCDCKLITGTKCPPGYEK | |
| | like antimicrobial | | |
| | peptides, plant | | |
| | defensin, tulip) | | |
| AP00551 | Ref, Combi-2 | FRWWHR | 2389 |
| | (synthetic) | | |
| AP00552 | Ref, Maximin 9 | GIGRKFLGGVKTTFRCGVKDFASK | 2390 |
| | (frog) | HLY | |
| AP00554 | Ref, Sl moricin | GKIPVKAIKKAGAAIGKGLRAINIA | 2391 |
| | (insect) | STAHDVYSFFKPKHKKK | |
| AP00555 | Ref, Parasin I | KGRGKQGGKVRAKAKTRSS | 2392 |
| | (catfish) | | |
| AP00556 | Ref, Kassinatuerin- | GFMKYIGPLIPHAVKAISDLI | 2393 |
| | 1 (frog) | | |
| AP00557 | Ref, Fowlicidin-1 | RVKRVWPLVIRTVIAGYNLYRAIK | 2394 |
| | (chCATH-1, bird | KK | |
| | cathelicidin, | | |
| | chicken | | |
| | cathelicidin) | | |
| AP00559 | Ref, Eryngin | ATRVVYCNRRSGSVVGGDDTVYY | 2395 |
| | (mushroom, fungi) | EG | |
| AP00560 | Ref, Dendrocin | TTLTLHNLCPYPVWWLVTPNNGG | 2396 |
| | (plant, bamboo) | FPIIDNTPVVLG | |
| AP00561 | Ref, Coconut | EQCREEEDDR | 2397 |
| | antifungal peptide | | |
| | (plant) | | |
| AP00562 | Ref, Pandinin 1 | GKVWDWIKSAAKKIWSSEPVSQL | 2398 |
| | (African scorpion) | KGQVLNAAKNYVAEKIGATPT | |
| AP00563 | Ref, White cloud | KTCENLADTFRGPCFATSNCDDHC | 2399 |
| | bean defensin | KNKEHLLSGRCRDDFRCWCTRNC | |
| | (plant defensin) | | |
| AP00564 | Ref, Dybowskin-1 | FLIGMTHGLICLISRKC | 2400 |
| | (frog) | | |
| AP00565 | Ref, Dybowskin-2 | FLIGMTQGLICLITRKC | 2401 |
| | (frog) | | |
| AP00566 | Ref, Dybowskin-3 | GLFDVVKGVLKGVGKNVAGSLLE | 2402 |
| | (frog) | QLKCKLSGGC | |
| AP00567 | Ref, Dybowskin-4 | VWPLGLVICKALKIC | 2403 |
| | (frog) | | |
| AP00568 | Ref, Dybowskin-5 | GLFSVVTGVLKAVGKNVAKNVGG | 2404 |
| | (frog) | SLLEQLKCKKISGGC | |
| AP00569 | Ref, Dybowskin-6 | FLPLLLAGLPLKLCFLFKKC | 2405 |
| | (frog) | | |
| AP00570 | Ref, Pleurain-A1 | SIITMTKEAKLPQLWKQIACRLYNTC | 2406 |
| | (frog) | | |
| AP00571 | Ref, Pleurain-A2 | SIITMTKEAKLPQSWKQIACRLYNTC | 2407 |
| | (frog) | | |
| AP00574 | Ref, Esculentin- | GLFSKFAGKGIKNLIFKGVKHIGKE | 2408 |
| | IGRa (frog) | VGMDVIRTGIDVAGCKIKGEC | |
| AP00575 | Ref, Brevinin- | GLLDTFKNLALNAAKSAGVSVLNS | 2409 |
| | 2GRa (frog) | LSCKLSKTC | |
| AP00576 | Ref, Brevinin- | GVLGTVKNLLIGAGKSAAQSVLKT | 2410 |
| | 2GRb (frog) | LSCKLSNDC | |
| AP00577 | Ref, Brevinin- | GLFTLIKGAAKLIGKTVAKEAGKT | 2411 |
| | 2GRc (frog) | GLELMACKITNQC | |
| AP00578 | Ref, Brevinin- | FLPLLAGLAANFLPKIFCKITKKC | 2412 |
| | 1GRa (frog) | | |
| AP00579 | Ref, Nigrocin- | GLLSGILGAGKHIVCGLSGLC | 2413 |
| | 2GRa (frog) | | |
| AP00580 | Ref, Nigrocin- | GLFGKILGVGKKVLCGLSGMC | 2414 |
| | 2GRb (frog) | | |
| AP00581 | Ref, Nigrocin- | GLLSGILGAGKNIVCGLSGLC | 2415 |
| | 2GRc (frog) | | |
| AP00582 | Ref, Brevinin- | GFSSLFKAGAKYLLKSVGKAGAQ | 2416 |
| | 2GHa (frog) | QLACKAANNCA | |
| AP00583 | Ref, Brevinin- | GVITDALKGAAKTVAAELLRKAH | 2417 |
| | 2GHb (frog) | CKLTNSC | |
| AP00584 | Ref, Guentherin | VIDDLKKVAKKVRRELLCKKHHK | 2418 |
| | (frog) | KLN | |
| AP00585 | Ref, Brevinin- | SIWEGIKNAGKGFLVSILDKVRCK | 2419 |
| | 2GHc (frog) | VAGGCNP | |
| AP00586 | Ref, Temporin-GH | FLPLLFGAISHLL | 2420 |
| | (frog) | | |
| AP00587 | Ref, Brevinin-2TSa | GIMSLFKGVLKTAGKHVAGSLVD | 2421 |
| | (frog) | QLKCKITGGC | |
| AP00588 | Ref, Brevinin-1TSa | FLGSIVGALASALPSLISKIRN | 2422 |
| | (frog) | | |
| AP00589 | Ref, Temporin- | FLGALAKIISGIF | 2423 |
| | 1TSa (frog) | | |
| AP00593 | Ref, Brevinin-1CSa | FLPILAGLAAKIVPKLFCLATKKC | 2424 |
| | (frog) | | |
| AP00594 | Ref, Temporin- | FLPIVGKLLSGLL | 2425 |
| | 1CSa (frog) | | |
| AP00595 | Ref, Temporin- | FLPIIGKLLSGLL | 2426 |
| | 1CSb (frog) | | |
| AP00596 | Ref, Temporin- | FLPLVTGLLSGLL | 2427 |
| | 1CSc (frog) | | |
| AP00597 | Ref, Temporin- | NFLGTLVNLAKKIL | 2428 |
| | 1CSd (frog) | | |
| AP00598 | Ref, Temporin- | FLSAITSLLGKLL | 2429 |
| | 1SPb (frog) | | |
| AP00599 | Ref, Brevinin-2- | GIWDTIKSMGKVFAGKILQNL | 2430 |
| | related (frog) | | |
| AP00600 | Ref, Odorranain- | GLLRASSVWGRKYYVDLAGCAKA | 2431 |
| | HP (frog) | | |
| AP00601 | Ref, Brevinin- | FLSLALAALPKFLCLVFKKC | 2432 |
| | 1DYa (frog) | | |
| AP00602 | Ref, Brevinin- | FLSLALAALPKLFCLIFKKC | 2433 |
| | 1DYb (frog) | | |
| AP00603 | Ref, Brevinin- | FLPLLLAGLPKLLCLFFKKC | 2434 |
| | 1DYc (frog) | | |
| AP00607 | Ref, Brevinin- | GLFDVVKGVLKGAGKNVAGSLLE | 2435 |
| | 2DYb (frog) | QLKCKLSGGC | |
| AP00608 | Ref, Brevinin- | GLFDVVKGVLKGVGKNVAGSLLE | 2436 |
| | 2DYc (frog) | QLKCKLSGGC | |
| AP00609 | Ref, Brevinin- | GIFDVVKGVLKGVGKNVAGSLLE | 2437 |
| | 2DYd (frog) | QLKCKLSGGC | |
| AP00610 | Ref, Brevinin- | GLFSVVTGVLKAVGKNVAKNVGG | 2438 |
| | 2DYe (frog) | SLLEQLKCKISGGC | |
| AP00611 | Ref, Temporin- | FIGPIISALASLFG | 2439 |
| | 1DYa (frog) | | |
| AP00615 | Ref, Palustrin-1b | ALFSILRGLKKLGNMGQAFVNCKI | 2440 |
| | (frog) | YKKC | |
| AP00616 | Ref, Palustrin-1c | ALSILRGLEKLAKMGIALTNCKAT | 2441 |
| | (frog) | KKC | |
| AP00617 | Ref, Palustrin-1d | ALSILKGLEKLAKMGIALTNCKAT | 2442 |
| | (frog) | KKC | |
| AP00619 | Ref, Palustrin-2b | GFFSTVKNLATNVAGTVIDTLKCK | 2443 |
| | (frog) | VTGGCRS | |
| AP00620 | Ref, Palustrin-2c | GFLSTVKNLATNVAGTVIDTLKCK | 2444 |
| | (frog) | VTGGCRS | |
| AP00621 | Ref, Palustrin-3a | GIFPKIIGKGIKTGIVNGIKSLVKGV | 2445 |
| | (frog) | GMKVFKAGLNNIGNTGCNEDEC | |
| AP00622 | Ref, Palustrin-3b | GIFPKIIGKGIKTGIVNGIKSLVKGV | 2446 |
| | (frog) | GMKVFKAGLSNIGNTGCNEDEC | |
| AP00624 | Ref, human ALL- | ALLGDFFRKSKEKIGKEFKRIVQRI | 2447 |
| | 38 (an LL-37 | KDFLRNLVPRTES | |
| | analog released | | |
| | from its precursor | | |
| | hCAP-18 by | | |
| | gastricsin in vivo) | | |
| AP00625 | Ref, human KR-20 | KRIVQRIKDFLRNLVPRTES | 2448 |
| | (KR20 from LL- | | |
| | 37) | | |
| AP00626 | Ref, human KS-30 | KSKEKIGKEFKRIVQRIKDFLRNLV | 2449 |
| | (KS30 from LL-37) | PRTES | |
| AP00627 | Ref, human RK-31 | RKSKEKIGKEFKRIVQRIKDFLRNL | 2450 |
| | (RK31 from LL- | VPRTES | |
| | 37) | | |
| AP00628 | Ref, human LL-23 | LLGDFFRKSKEKIGKEFKRIVQR | 2451 |
| | (LL23 from LL-37) | | |
| AP00629 | Ref, human LL-29 | LLGDFFRKSKEKIGKEFKRIVQRIK | 2452 |
| | (LL29 from LL-37) | DFLR | |
| AP00630 | Ref, Amoeba | GEILCNLCTGLINTLENLLTTKGAD | 2453 |
| | peptide (protozoan | | |
| | para | | |
| AP00631 | Ref, Mundticin | KYYGNGVSCNKKGCSVDWGKAIG | 2454 |
| | (bacteria) | IIGNNSAANLATGGAAGWSK | |
| AP00638 | Ref, Citropin 2.1 | GLIGSIGKALGGLLVDVLKPKL | 2455 |
| | (frog) | | |
| AP00639 | Ref, Citropin 2.1.3 | GLIGSIGKALGGLLVDVLKPKLQA | 2456 |
| | (frog) | AS | |
| AP00640 | Ref, Maculatin 1.3 | GLLGLLGSVVSHVVPAIVGHF | 2457 |
| | (frog) | | |
| AP00641 | Ref, Pardaxin 1 | GFFALIPKIISSPLFKTLLSAVGSALS | 2458 |
| | (Pardaxin P-1, | SSGEQE | |
| | Pardaxin P1, Pa1, | | |
| | flat fish) | | |
| AP00642 | Ref, Pardaxin 2 | GFFALIPKIISSPIFKTLLSAVGSALS | 2459 |
| | (Pardaxin P-2, | SSGGQE | |
| | Pardaxin P2, Pa2, | | |
| | flat fish) | | |
| AP00643 | Ref, Pardaxin 3 | GFFAFIPKIISSPLFKTLLSAVGSALS | 2460 |
| | (Pardaxin P-3, | SSGEQE | |
| | Pardaxin P3, Pa3, | | |
| | flat fish) | | |
| AP00645 | Ref, Pardaxin 5 | GFFAFIPKIISSPLFKTLLSAVGSALS | 2461 |
| | (Pardaxin P-5, | SSGDQE | |
| | Pardaxin P5, Pa5, | | |
| | flat fish) | | |
| AP00647 | Ref, Brevinin-1PLb | FLPLIAGLAANFLPKIFCAITKKC | 2462 |
| | (frog) | | |
| AP00648 | Ref, Brevinin-1PLc | FLPVIAGVAAKFLPKIFCAITKKC | 2463 |
| | (frog) | | |
| AP00649 | Ref, Esculentin- | GLFPKINKKKAKTGVFNIIKTVGKE | 2464 |
| | 1PLa (frog) | AGMDLIRTGIDTIGCKIKGEC | |
| AP00650 | Ref, Esculentin- | GIFTKINKKKAKTGVFNIIKTIGKEA | 2465 |
| | 1PLb (frog) | GMDVIRAGIDTISCKIKGEC | |
| AP00651 | Ref, Esculentin- | GLFSILKGVGKIALKGLAKNMGK | 2466 |
| | 2PLa (frog) | MGLDLVSCKISKEC | |
| AP00652 | Ref, Ranatuerin- | GIMDTVKNVAKNLAGQLLDKLKC | 2467 |
| | 2PLa (frog) | KITAC | |
| AP00653 | Ref, Ranatuerin- | GIMDTVKNAAKDLAGQLLDKLKC | 2468 |
| | 2PLb (frog) | RITGC | |
| AP00654 | Ref, Ranatuerin- | GLLDTIKNTAKNLAVGLLDKIKCK | 2469 |
| | 2PLc (frog) | MTGC | |
| AP00655 | Ref, Ranatuerin- | GIMDSVKNVAKNIAGQLLDKLKC | 2470 |
| | 2PLd (frog) | KITGC | |
| AP00656 | Ref, Ranatuerin- | GIMDSVKNAAKNLAGQLLDTIKCK | 2471 |
| | 2PLe (frog) | ITAC | |
| AP00657 | Ref, Ranatuerin- | GIMDTVKNAAKDLAGQLDKLKCR | 2472 |
| | 2PLf (frog) | ITGC | |
| AP00658 | Ref, Temporin- | FLPLVGKILSGLI | 2473 |
| | 1PLa (frog) | | |
| AP00659 | Ref, Ranatuerin 5 | FLPIASLLGKYL | 2474 |
| | (frog) | | |
| AP00661 | Ref, Esculentin-2L | GILSLFTGGIKALGKTLFKMAGKA | 2475 |
| | (frog) | GAEHLACKATNQC | |
| AP00662 | Ref, Esculentin-2B | GLFSILRGAAKFASKGLGKDLTKL | 2476 |
| | (ESC2B-RANBE, | GVDLVACKISKQC | |
| | frog) | | |
| AP00663 | Ref, Esculentin-2P | GFSSIFRGVAKFASKGLGKDLARL | 2477 |
| | (frog) | GVNLVACKISKQC | |
| AP00664 | Ref, Peptide A1 | FLPAIAGILSQLF | 2478 |
| | (frog) | | |
| AP00665 | Ref, Peptide B9 | FLPLIAGLIGKLF | 2479 |
| | (frog) | | |
| AP00666 | Ref, PG-L ( frog) | EGGGPQWAVGHFM | 2480 |
| AP00667 | Ref, PG-KI (frog) | EPHPDEFVGLM | 2481 |
| AP00668 | Ref, PG-KII (frog) | EPNPDEFVGLM | 2482 |
| AP00669 | Ref, PG-KIII (frog) | EPHPNEFVGLM | 2483 |
| AP00670 | Ref, PG-SPI (frog) | EPNPDEFFGLM | 2484 |
| AP00660 | Ref, Pandinin 2 | FWGALAKGALKLIPSLFSSFSKKD | 2485 |
| | (African scorpion) | | |
| AP00671 | Ref, PG-SPII (frog) | EPNPNEFFGLM | 2486 |
| AP00673 | Ref, Lantibiotic | WKSESVCTPGCVTGVLQTCFLQTI | 2487 |
| | Ericin S (bacteria | TCNCHISK | |
| AP00674 | Ref, Lantibiotic | VLSKSLCTPGCITGPLQTCYLCFPT | 2488 |
| | Ericin A (bacteria | FAKC | |
| AP00675 | Ref, Human beta | FELDRICGYGTARCRKKCRSQEYRI | 2489 |
| | defensin 4 (HBD-4, | GRCPNTYACCLRKWDESLLNRTKP | |
| | HBD4, human | | |
| | defensin) | | |
| AP00676 | Ref, RL-37 (RL37, | RLGNFFRKVKEKIGGGLKKVGQKI | 2490 |
| | monkey | KDFLGNLVPRTAS | |
| | cathelicidin) | | |
| AP00677 | Ref, CAP11 | GLRKKFRKTRKRIQKLGRKIGKTG | 2491 |
| | (Guinea pig | RKVWKAWREYGQIPYPCRI | |
| | cathelicidin) | | |
| AP00678 | Ref, Canine | RLKELITTGGQKIGEKIRRIGQRIKD | 2492 |
| | cathelicidin | FFKNLQPREEKS | |
| | (K9CATH) (dog) | | |
| AP00679 | Ref, Esculentin | GLFSILKGVGKIAIKGLGKNLGKM | 2493 |
| | 2VEb (frog) | GLDLVSCKISKEC | |
| AP00680 | Ref, SMAP-34 | GLFGRLRDSLQRGGQKILEKAERI | 2494 |
| | (sheep cathelicidin) | WCKIKDIFR | |
| AP00681 | Ref, OaBac5 | RFRPPIRRPPIRPPFRPPFRPPVRPPIR | 2495 |
| | (sheep cathelicidin) | PPFRPPFRPPIGPFP | |
| AP00682 | Ref, OaBac6 | RRLRPRHQHFPSERPWPKPLPLPLP | 2496 |
| | (sheep cathelicidin) | RPGPRPWPKPLPLPLPRPGLRPWPK | |
| | | PL | |
| AP00683 | Ref, OaBac7.5 | RRLRPRRPRLPRPRPRPRPRPRSLPL | 2497 |
| | (sheep cathelicidin) | PRPQPRRIPRPILLPWRPPRPIPRPQI | |
| | | QPIPRWL | |
| AP00684 | Ref, OaBac11 | RRLRPRRPRLPRPRPRPRPRPRSLPL | 2498 |
| | (sheep cathelicidin) | PRPKPRPIPRPLPLPRPRPKPIPRPLP | |
| | | LPRPRPRRIPRPLPLPRPRPRPIPRPL | |
| | | PLPQPQPSPIPRPL | |
| AP00685 | Ref, Ranatuerin | GIMDTVKGVAKTVAASLLDKLKC | 2499 |
| | 2VEb (frog) | KITGC | |
| AP00686 | Ref, eCATH-1 | KRFGRLAKSFLRMRILLPRRKILLAS | 2500 |
| | (horse cathelicidin) | | |
| AP00687 | Ref, eCATH-2 | KRRHWFPLSFQEFLEQLRRFRDQL | 2501 |
| | (horse cathelicidin) | PFP | |
| AP00688 | Ref, eCATH-3 | KRFHSVGSLIQRHQQMIRDKSEAT | 2502 |
| | (horse cathelicidin) | RHGIRIITRPKLLLAS | |
| AP00689 | Ref, Prophenin-1 | AFPPPNVPGPRFPPPNFPGPRFPPPN | 2503 |
| | (pig cathelicidin) | FPGPRFPPPNFPGPRFPPPNFPGPPFP | |
| | | PPIFPGPWFPPPPPFRPPPFGPPRFP | |
| AP00690 | Ref, Prophenin-2 | AFPPPNVPGPRFPPPNVPGPRFPPPN | 2504 |
| | (pig cathelicidin) | FPGPRFPPPNFPGPRFPPPNFPGPPFP | |
| | | PPIFPGPWFPPPPPFRPPPFGPPRFP | |
| AP00691 | Ref, HFIAP-1 | GFFKKAWRKVKHAGRRVLDTAK | 2505 |
| | (hagfish | GVGRHYVNNWLNRYR | |
| | cathelicidin) | | |
| AP00692 | Ref, HFIAP-3 | GWFKKAWRKVKNAGRRVLKGVG | 2506 |
| | (hagfish | IHYGVGLI | |
| | cathelicidin) | | |
| AP00693 | Ref, Trout cath | RICSRDKNCVSRPGVGSIIGRPGGG | 2507 |
| | (fish cathelicidin) | SLIGRPGGGSVIGRPGGGSPPGGGS | |
| | | FNDEFIRDHSDGNRFA | |
| AP00694 | Ref, MRP | AIGSILGALAKGLPTLISWIKNR | 2508 |
| | (melittin-related | | |
| | peptide) | | |
| AP00695 | Ref, Temporin- | FLPILGKLLSGIL | 2509 |
| | 1TGa (frog) | | |
| AP00696 | Ref, Dahlein 1.1 | GLFDIIKNIVSTL | 2510 |
| | (frog) | | |
| AP00697 | Ref, Dahlein 1.2 | GLFDIIKNIFSGL | 2511 |
| | (frog) | | |
| AP00698 | Ref, Dahlein 4.1 | GLWQLIKDKIKDAATGFVTGIQS | 2512 |
| | (frog) | | |
| AP00699 | Ref, Dahlein 4.2 | GLWQFIKDKLKDAATGLVTGIQS | 2513 |
| | (frog) | | |
| AP00700 | Ref, Dahlein 4.3 | GLWQFIKDKFKDAATGLVTGIQS | 2514 |
| | (frog) | | |
| AP00701 | Ref, Dahlein 5.1 | GLLGSIGNAIGAFIANKLKP | 2515 |
| | (frog) | | |
| AP00702 | Ref, Dahlein 5.2 | GLLGSIGNAIGAFIANKLKPK | 2516 |
| | (frog) | | |
| AP00703 | Ref, Dahlein 5.3 | GLLASLGKVLGGYLAEKLKP | 2517 |
| | (frog) | | |
| AP00704 | Ref, Dahlein 5.4 | GLLGSIGKVLGGYLAEKLKPK | 2518 |
| | (frog) | | |
| AP00705 | Ref, Dahlein 5.5 | GLLASLGKVLGGYLAEKLKPK | 2519 |
| | (frog) | | |
| AP00706 | Ref, Dahlein 5.6 | GLLASLGKVFGGYLAEKLKPK | 2520 |
| | (frog) | | |
| AP00709 | Ref, Mytilus | GFGCPNDYPCHRHCKSIPGRAGGY | 2521 |
| | defensin (mytilin) | CGGAHRLRCTCYR | |
| | A (mollusc) | | |
| AP00711 | Ref, Mussel | GFGCPNNYACHQHCKSIRGYCGG | 2522 |
| | defensin MGD2 | YCAGWFRLRCTCYRCG | |
| AP00712 | Ref, scorpion | GFGCPLNQGACHRHCRSIRRRGGY | 2523 |
| | defensin | CAGFFKQTCCYRN | |
| AP00713 | Ref, Androctonus | GFGCPFNQGACHRHCRSIRRRGGY | 2524 |
| | defensin | CAGLFKQTCTCYR | |
| AP00714 | Ref, Orinthodoros | GYGCPFNQYQCHSHCSGIRGYKGG | 2525 |
| | defensin A (soft | YCKGTFKQTCKCY | |
| | ticks) | | |
| AP00715 | Ref, VaD1 (plant | RTCMKKEGWGKCLIDTTCAHSCK | 2526 |
| | defensin) | NRGYIGGNCKGMTRTCYCLVNC | |
| AP00722 | Ref, Cryptonin | GLLNGLALRLGKRALKKIIKRLCR | 2527 |
| | (insect, cicada) | | |
| AP00723 | Ref, Decoralin | SLLSLLRKLIT | 2528 |
| | (insect) | | |
| AP00724 | Ref, RTD-2 (rhesus | RCLCRRGVCRCLCRRGVC | 2529 |
| | theta-defensin-2, | | |
| | minidefensin, | | |
| | XXC, BBS, lectin, | | |
| | ZZHa) | | |
| AP00725 | Ref, RTD-3 (rhesus | RCICTRGFCRCICTRGFC | 2530 |
| | theta-defensin-3, | | |
| | minidefensin, | | |
| | XXC, BBS, lectin, | | |
| | ZZHa) | | |
| AP00726 | Ref, Combi-1 | RRWWRF | 2531 |
| | (synthetic) | | |
| AP00748 | Ref, Gm pro-rich | DIQIPGIKKPTHRDIIIPNWNPNVRT | 2532 |
| | pept1 (insect) | QPWQRFGGNKS | |
| AP00749 | Ref, Gm anionic | EADEPLWLYKGDNIERAPTTADHP | 2533 |
| | pept 1 (insect) | ILPSIIDDVKLDPNRRYA | |
| AP00750 | Ref, Gm pro-rich | EIRLPEPFRFPSPTVPKPIDIDPILPHP | 2534 |
| | pept 2 (insect) | WSPRQTYPIIARRS | |
| AP00752 | Ref, Gm defensin- | DKLIGSCVWGATNYTSDCNAECK | 2535 |
| | like peptide (insect) | RRGYKGGHCGSFWNVNCWCEE | |
| AP00753 | Ref, Gm | VQETQKLAKTVGANLEETNKKLA | 2536 |
| | apolipophoricin | PQIKSAYDDFVKQAQEVQKKLHE | |
| | (insect) | AASKQ | |
| AP00754 | Ref, Gm anionic | ETESTPDYLKNIQQQLEEYTKNFNT | 2537 |
| | pept2 (insect) | QVQNAFDSDKIKSEVNNFIESLGKI | |
| | | LNTEKKEAPK | |
| AP00755 | Ref, Gm cecropin | ENFFKEIERAGQRIRDAIISAAPAVE | 2538 |
| | D-like pept, insect | TLAQAQKIIKGGD | |
| AP00756 | Ref, Dermaseptin- | ALWKDILKNAGKAALNEINQLVNQ | 2539 |
| | B6 (DRS-B6, DRS | | |
| | B6, XXA, frog) | | |
| AP00759 | Ref, Phylloseptin- | FLSLIPHAINAVSTLVHHSG | 2540 |
| | O1 (PLS-O1, | | |
| | Phylloseptin-4, PS- | | |
| | 4, XXA, frog) | | |
| AP00760 | Ref, Phylloseptin- | FLSLIPHAINAVSAIAKHS | 2541 |
| | O2 (PLS-O2, | | |
| | Phylloseptin-5, PS- | | |
| | 5, XXA, frog) | | |
| AP00761 | Ref, Phylloseptin-6 | SLIPHAINAVSAIAKHF | 2542 |
| | (Phylloseptin-H4, | | |
| | PLS-H4, PS-6, | | |
| | XXA, frog) | | |
| AP00762 | Ref, Phylloseptin-7 | FLSLIPHAINAVSAIAKHF | 2543 |
| | (Phylloseptin-H5, | | |
| | PLS-H5, PS-7, | | |
| | XXA, frog) | | |
| AP00763 | Ref, Dermaseptin | GLWSTIKNVGKEAAIAAGKAALG | 2544 |
| | DPh-1 (XXA, frog) | AL | |
| AP00764 | Ref, Dermaseptin- | GLRSKIWLWVLLMIWQESNKFKKM | 2545 |
| | S9 (DRS-S9, DRS | | |
| | S9, frog) | | |
| AP00765 | Ref, Human salvic | MHDFWVLWVLLEYIYNSACSVLS | 2546 |
| | | ATSSVSSRVLNRSLQVKVVKITN | |
| AP00766 | Ref, Gassericin A | IYWIADQFGIHLATGTARKLLDAM | 2547 |
| | (XXC, XXD2, | ASGASLGTAFAAILGVTLPAWALA | |
| | class IV | AAGALGATAA | |
| | bacteriocin, Gram- | | |
| | positive bacteria) | | |
| AP00767 | Ref, Circularin A | VAGALGVQTAAATTIVNVILNAGT | 2548 |
| | (XXC, class IV | LVTVLGIIASIASGGAGTLMTIGWA | |
| | bacteriocin, Gram- | TFKATVQKLAKQSMARAIAY | |
| | positive bacteria) | | |
| AP00768 | Ref, Closticin 574 | PNWTKIGKCAGSIAWAIGSGLFGG | 2549 |
| | (bacteria) | AKLIKIKKYIAELGGLQKAAKLLV | |
| | | GATTWEEKLHAGGYALINLAAELT | |
| | | GVAGIQANCF | |
| AP00769 | Ref, Caerin 1.11 | GLLGAMFKVASKVLPHVVPAITEHF | 2550 |
| | (XXA, frog) | | |
| AP00770 | Ref, Maculatin 1.4 | GLLGLLGSVVSHVLPAITQHL | 2551 |
| | (XXA, frog) | | |
| AP00771 | Ref, Magainin 1 | GIGKFLHSAGKFGKAFVGEIMKS | 2552 |
| | (frog) | | |
| AP00772 | Ref, Oxyopinin 1 | FRGLAKLLKIGLKSFARVLKKVLP | 2553 |
| | (spider) | KAAKAGKALAKSMADENAIRQQNQ | |
| AP00773 | Ref, Oxyopinin 2a | GKFSVFGKILRSIAKVFKGVGKVR | 2554 |
| | (spider) | KQFKTASDLDKNQ | |
| AP00774 | Ref, Oxyopinin 2b | GKFSGFAKILKSIAKFFKGVGKVR | 2555 |
| | (spider) | KGFKEASDLDKNQ | |
| AP00775 | Ref, Oxyopinin 2c | GKLSGISKVLRAIAKFFKGVGKAR | 2556 |
| | (spider) | KQFKEASDLDKNQ | |
| AP00776 | Ref, Oxyopinin 2d | GKFSVFSKILRSIAKVFKGVGKVRK | 2557 |
| | (spider) | GFKTASDLDKNQ | |
| AP00777 | Ref, NRC-1 (XXA, | GKGRWLERIGKAGGIIIGGALDHL | 2558 |
| | fish, gene | | |
| | predicted) | | |
| AP00778 | Ref, NRC-2 (XXA, | WLRRIGKGVKIIGGAALDHL | 2559 |
| | fish, gene | | |
| | predicted) | | |
| AP00779 | Ref, NRC-3 (XXA, | GRRKRKWLRRIGKGVKIIGGAALD | 2560 |
| | fish, gene | HL | |
| | predicted) | | |
| AP00781 | Ref, NRC-5 (XXA, | FLGALIKGAIHGGRFIHGMIQNHH | 2561 |
| | fish, gene | | |
| | predicted) | | |
| AP00782 | Ref, NRC-6 (XXA, | GWGSIFKHGRHAAKHIGHAAVNH | 2562 |
| | fish, gene | YL | |
| | predicted) | | |
| AP00783 | Ref, NRC-7 (XXA, | RWGKWFKKATHVGKHVGKAALT | 2563 |
| | fish, gene | AYL | |
| | predicted) | | |
| AP00784 | Ref, NRC-10 | FFRLLFHGVHHVGKIKPRA | 2564 |
| | (XXA, fish, gene | | |
| | predicted) | | |
| AP00785 | Ref, NRC-11 | GWKSVFRKAKKVGKTVGGLALD | 2565 |
| | (XXA, fish, gene | HYL | |
| | predicted) | | |
| AP00786 | Ref, NRC-12 | GWKKWFNRAKKVGKTVGGLAVD | 2566 |
| | (XXA, fish, gene | HYL | |
| | predicted) | | |
| AP00787 | Ref, NRC-13 | GWRLLLKKAEVKTVGKLALKHYL | 2567 |
| | (XXA, fish, gene | | |
| | predicted) | | |
| AP00788 | Ref, NRC-14 | AGWGSIFKHIFKAGKFIHGAIQAHND | 2568 |
| | (XXA, fish, gene | | |
| | predicted) | | |
| AP00789 | Ref, NRC-15 | GFWGKLFKLGLHGIGLLHLHL | 2569 |
| | (XXA, fish, gene | | |
| | predicted) | | |
| AP00790 | Ref, NRC-16 | GWKKWLRKGAKHLGQAAIK | 2570 |
| | (XXA, fish, gene | | |
| | predicted) | | |
| AP00791 | Ref, NRC-17 | GWKKWLRKGAKHLGQAAIKGLAS | 2571 |
| | (XXA, fish, gene | | |
| | predicted) | | |
| AP00792 | Ref, NRC-19 | FLGLLFHGVHHVGKWIHGLIHGHH | 2572 |
| | (XXA, fish, gene | | |
| | predicted) | | |
| AP00793 | Ref, Bombinin H2 | IIGPVLGLVGSALGGLLKKI | 2573 |
| | (XXA, frog) | | |
| AP00794 | Ref, Bombinin H3 | IIGPVLGMVGSALGGLLKKI | 2574 |
| | (frog, XXD, XXA) | | |
| AP00795 | Ref, Bombinin H7 | ILGPILGLVSNALGGLL | 2575 |
| | (frog, XXD, XXA) | | |
| AP00796 | Ref, Bombinin GH- | IIGPVLGLVGKPLESLLE | 2576 |
| | 1L (XXA, toad) | | |
| AP00797 | Ref, Bombinin GH- | IIGPVLGLVGKPLESLLE | 2577 |
| | 1D (toad, XXD, | | |
| | XXA) | | |
| AP00807 | Ref, Enterocin E- | NRWYCNSAAGGVGGAAGCVLAG | 2578 |
| | 760 (bacteriocin, | YVGEAKENIAGEVRKGWGMAGGF | |
| | bacteria) | THNKACKSFPGSGWASG | |
| AP00808 | Ref, hepcidin (fish) | CRFCCRCCPRMRGCGLCCRF | 2579 |
| AP00809 | Ref, hepcidin TH1- | GIKCRFCCGCCTPGICGVCCRF | 2580 |
| | 5 (fish) | | |
| AP00810 | Ref, hepcidin TH2- | QSHLSLCRWCCNCCRSNKGC | 2581 |
| | 3 (fish) | | |
| AP00811 | Ref, human LEAP-2 | MTPFWRGVSLRPIGASCRDDSECIT | 2582 |
| | | RLCRKRRCSLSVAQE | |
| AP00812 | Ref, Enkelytin | FAEPLPSEEEGESYSKEPPEMEKRY | 2583 |
| | (cow) | GGFM | |
| AP00732 | Ref, Spheniscin-1 | SFGLCRLRRGSCAHGRCRFPSIPIG | 2584 |
| | (Sphe-1, avian | RCSRFVQCCRRVW | |
| | defensin) | | |
| AP00733 | Ref, Organgutan | LLGDFFRKAREKIGEEFKRIVQRIK | 2585 |
| | ppyLL-37 (Great | DFLRNLVPRTES | |
| | Ape, primate | | |
| | cathelicidin) | | |
| AP00734 | Ref, Gibbon | SLGNFFRKARKKIGEEFKRIVQRIK | 2586 |
| | hmdSL-37 | DFLQHLIPRTEA | |
| | (hylobatidae, | | |
| | primate | | |
| | cathelicidin) | | |
| AP00735 | Ref, pobRL-37 | RLGNFFRKAKKKIGRGLKKIGQKI | 2587 |
| | (cercopithecidae, | KDFLGNLVPRTES | |
| | primate | | |
| | cathelicidin) | | |
| AP00736 | Ref, cjaRL-37 | RLGDILQKAREKIEGGLKKLVQKI | 2588 |
| | (primate | KDFFGKFAPRTES | |
| | cathelicidin) | | |
| AP00737 | Ref, Plasticin | GLVTSLIKGAGKLLGGLFGSVTG | 2589 |
| | PBN2KF (XXA, | | |
| | DRP-PBN2, frog) | | |
| AP00738 | Ref, Plasticin | GLVTGLLKTAGKLLGDLFGSLTG | 2590 |
| | ANCKF (XXA, | | |
| | synthetic) | | |
| AP00739 | Ref, Plasticin | GVVTDLLKTAGKLLGNLFGSLSG | 2591 |
| | PD36KF (XXA, | | |
| | synthetic) | | |
| AP00740 | Ref, Plasticin | GVVTDLLKTAGKLLGNLVGSLSG | 2592 |
| | PD36K (XXA, | | |
| | synthetic) | | |
| AP00741 | Ref, Chicken | PITYLDAILAAVRLLNQRISGPCILR | 2593 |
| | cathelicidin-B1 | LREAQPRPGWVGTLQRRREVSFLV | |
| | (bird cathelicidin) | EDGPCPPGVDCRSCEPGALQHCVG | |
| | | TVSIEQQPTAELRCRPLRPQ | |
| AP00742 | Ref, Chicken | MRILYLLLSVLFVVLQGVAGQPYF | 2594 |
| | gallinacin 4 (Gal 4) | SSPIHACRYQRGVCIPGPCRWPYY | |
| | | RVGSCGSGLKSCCVRNRWA | |
| AP00743 | Ref, Chicken | MKILCFFIVLFVAVHGAVGFSRSPR | 2595 |
| | gallinacin 7 (Gal 7) | YHMQCGYRGTFCTPGKCPYGNAY | |
| | | LGLCRPKYSCCRWL | |
| AP00744 | Ref, Chicken | MQILPLLFAVLLLMLRAEPGLSLA | 2596 |
| | gallinacin 9 (Gal 9) | RGLPQDCERRGGFCSHKSCPPGIGR | |
| | | IGLCSKEDFCCRSRWYS | |
| AP00745 | Ref, Chicken | MTPFWRGVSLRPVGASCRDNSECI | 2597 |
| | LEAP-2 (cLEAP- | TMLCRKNRCFLRTASE | |
| | 2) | | |
| AP00814 | Ref, Caerulein | GLGSILGKILNVAGKVGKTIGKVA | 2598 |
| | precursor-related | DAVGNKE | |
| | fragment Ea | | |
| | (CPRF-Ea, frog) | | |
| AP00815 | Ref, Caerulein | GLGSFLKNAIKIAGKVGSTIGKVAD | 2599 |
| | precursor-related | AIGNKE | |
| | fragment Eb | | |
| | (CPRF-Eb, frog) | | |
| AP00816 | Ref, Caerulein | GLGSFFKNAIKIAGKVGSTIGKVAD | 2600 |
| | precursor-related | AIGNKE | |
| | fragment Ec | | |
| | (CPRF-Ec, frog) | | |
| AP00817 | Ref, Temporin-1Oa | FLPLLASLFSRLL | 2601 |
| | (frog) | | |
| AP00818 | Ref, Temporin-1Ob | FLPLIGKILGTIL | 2602 |
| | (frog) | | |
| AP00819 | Ref, Temporin-1Oc | FLPLLASLFSRLF | 2603 |
| | (frog) | | |
| AP00820 | Ref, Temporin-1Od | FLPLLASLFSGLF | 2604 |
| | (frog) | | |
| AP00821 | Ref, Brevinin-20a | GLFNVFKGLKTAGKHVAGSLLNQ | 2605 |
| | (frog) | LKCKVSGGC | |
| AP00822 | Ref, Brevinin-20b | GIFNVFKGALKTAGKHVAGSLLNQ | 2606 |
| | (frog) | LKCKVSGEC | |
| AP00824 | Ref, Temporin-1Gb | SILPTIVSFLSKFL | 2607 |
| | (XXA, frog) | | |
| AP00825 | Ref, Temporin-1Gc | SILPTIVSFLTKFL | 2608 |
| | (XXA, frog) | | |
| AP00826 | Ref, Temporin-1Gd | FILPLIASFLSKFL | 2609 |
| | (XXA, frog) | | |
| AP00827 | Ref, Ranatuerin- | SMISVLKNLGKVGLGFVACKVNK | 2610 |
| | 1Ga (frog) | QC | |
| AP00829 | Ref, Ranalexin-1G | FLGGLMKIIPAAFCAVTKKC | 2611 |
| | (frog) | | |
| AP00830 | Ref, Ranatuerin-2G | GLLLDTLKGAAKDIAGIALEKLKC | 2612 |
| | (frog) | KITGCKP | |
| AP00831 | Ref, Odorranain- | GLLSGILGAGKHIVCGLTGCAKA | 2613 |
| | NR (frog) | | |
| AP00832 | Ref, Maximin H1 | ILGPVISTIGGVLGGLLKNL | 2614 |
| | (XXA, toad) | | |
| AP00834 | Ref, G. mellonella | KVNANAIKKGGKAIGKGFKVISAA | 2615 |
| | moricin-like | STAHDVYEHIKNRRH | |
| | peptide A (Gm- | | |
| | mlpA, insect) | | |
| AP00835 | Ref, G. mellonella | GKIPVKAIKKGGQIIGKALRGINIAS | 2616 |
| | moricin-like | TAHDIISQFKPKKKKNH | |
| | peptide B (Gm- | | |
| | mlpB, insect) | | |
| AP00836 | Ref, G. mellonella | KVPIGAIKKGGKIIKKGLGVIGAAG | 2617 |
| | moricin-like | TAHEVYSHVKNRH | |
| | peptide C1 (Gm- | | |
| | mlpC1, insect) | | |
| AP00837 | Ref, G. mellonella | KVPIGAIKKGGKIIKKGLGVLGAA | 2618 |
| | moricin-like | GTAHEVYNHVRNRQ | |
| | peptide C2 (Gm- | | |
| | mlpC2, insect) | | |
| AP00838 | Ref, G. mellonella | KVPIGAIKKGGKIIKKGLGVIGAAG | 2619 |
| | moricin-like | TAHEVYSHVKNRQ | |
| | peptide C3 (Gm- | | |
| | mlpC3, insect) | | |
| AP00839 | Ref, G. mellonella | KVPVGAIKKGGKAIKTGLGVVGA | 2620 |
| | moricin-like | AGTAHEVYSHIRNRH | |
| | peptide C4/C5 | | |
| | (Gm-mlpC4/C5, | | |
| | insect) | | |
| AP00840 | Ref, G. mellonella | KGIGSALKKGGKIIKGGLGALGAIG | 2621 |
| | moricin-like | TGQQVYEHVQNRQ | |
| | peptide D (Gm- | | |
| | mlpD, insect) | | |
| AP00841 | Ref, Enterocin A | TTHSGKYYGNGVYCTKNKCTVD | 2622 |
| | (EntA, class IIA | WAKATTCIAGMSIGGFLGGAIPGKC | |
| | bacteriocin, i.e. | | |
| | pediocin-like | | |
| | peptide, bacteria) | | |
| AP00842 | Ref, Divercin V41 | TKYYGNGVYCNSKKCWVDWGQA | 2623 |
| | (DvnV41, class IIa | SGCIGQTVVGGWLGGAIPGKC | |
| | bacteriocin, | | |
| | pediocin-like | | |
| | peptide, bacteria. | | |
| | DvnRV41 is the | | |
| | recombinant form) | | |
| AP00843 | Ref, Divergicin | TKYYGNGVYCNSKKCWVDWGTA | 2624 |
| | M35 (class IIa | QGCIDVVIGQLGGGIPGKGKC | |
| | bacteriocin, | | |
| | pediocin-like | | |
| | peptide, bacteria) | | |
| AP00844 | Ref, Coagulin | KYYGNGVTCGKHSCSVDWGKATT | 2625 |
| | (bacteriocin, | CIINNGAMAWATGGHQGTHKC | |
| | pediocin-like | | |
| | peptide, bacteria) | | |
| AP00845 | Ref, Listeriocin | KSYGNGVHCNKKKCWVDWGSAIS | 2626 |
| | 743A (class IIa | TIGNNSAANWATGGAAGWKS | |
| | bacteriocin, | | |
| | pediocin-like | | |
| | peptide, bacteria) | | |
| AP00846 | Ref, Mundticin KS | KYYGNGVSCNKKGCSVDWGKAIG | 2627 |
| | (enterocin CRL35, | IIGNNSAANLATGGAAGWKS | |
| | mundticin ATO6, | | |
| | mundticin QU2, | | |
| | class IIa | | |
| | bacteriocin, | | |
| | pediocin-like | | |
| | peptide, bacteria) | | |
| AP00847 | Ref, Sakacin 5X | KYYGNGLSCNKSGCSVDWSKAISII | 2628 |
| | (Sak5X, class IIa | GNNAVANLTTGGAAGWKS | |
| | bacteriocin, | | |
| | pediocin-like | | |
| | peptide, bacteria) | | |
| AP00848 | Ref, Leucocin C | KNYGNGVHCTKKGCSVDWGYAW | 2629 |
| | (class IIa | ANIANNSVMNGLTGGNAGWHN | |
| | bacteriocin, | | |
| | pediocin-like | | |
| | peptide, bacteria) | | |
| AP00849 | Ref, Lactococcin | TSYGNGVHCNKSKCWIDVSELETY | 2630 |
| | MMFII (class IIa | KAGTVSNPKDILW | |
| | bacteriocin, | | |
| | pediocin-like | | |
| | peptide, bacteria) | | |
| AP00850 | Ref, Sakacin G | KYYGNGVSCNSHGCSVNWGQAW | 2631 |
| | (SakG, class IIa | TCGVNHLANGGHGVC | |
| | bacteriocin, | | |
| | pediocin-like | | |
| | peptide, bacteria) | | |
| AP00851 | Ref, Plantaricin | KYYGNGVTCGKHSCSVNWGQAFS | 2632 |
| | 423 (class IIa | CSVSHLANFGHGKC | |
| | bacteriocin, | | |
| | pediocin-like | | |
| | peptide, bacteria) | | |
| AP00852 | Ref, Plantaricin | KYYGNGLSCSKKGCTVNWGQAFS | 2633 |
| | C19 (class IIa | CGVNRVATAGHHKC | |
| | bacteriocin, | | |
| | pediocin-like | | |
| | peptide, bacteria) | | |
| AP00853 | Ref, Enterocin P | ATRSYGNGVYCNNSKCWVNWGE | 2634 |
| | (EntP, class IIa | AKENIAGIVISGWASGLAGMGH | |
| | bacteriocin, | | |
| | pediocin-like | | |
| | peptide, bacteria) | | |
| AP00854 | Ref, Bacteriocin 31 | ATYYGNGLYCNKQKCWVDWNKA | 2635 |
| | (Bac 31, Bac31, | SREIGKIIVNGWVQHGPWAPR | |
| | class IIa | | |
| | bacteriocin, | | |
| | pediocin-like | | |
| | peptide, bacteria) | | |
| AP00855 | Ref, MSI-78 | GIGKFLKKAKKFGKAFVKILKK | 2636 |
| | (XXA, synthetic) | | |
| AP00856 | Ref, MSI-594 | GIGKFLKKAKKGIGAVLKVLTTGL | 2637 |
| | (XXA, synthetic) | | |
| AP00857 | Ref, Catestatin | SSMKLSFRARAYGFRGPGPQL | 2638 |
| | (human | | |
| | CHGA(352-372), | | |
| | human Cst) | | |
| AP00858 | Ref, Temporin D | LLPIVGNLLNSLL | 2639 |
| | (XXA, frog) | | |
| AP00859 | Ref, Temporin H | LSPNLLKSLL | 2640 |
| | (XXA, frog) | | |
| AP00861 | Ref, Brevinin-ALb | FLPLAVSLAANFLPKLFCKITKKC | 2641 |
| | (frog) | | |
| AP00862 | Ref, Brevinin 1E | FLPLLAGLAANFLPKIFCKITKRC | 2642 |
| | (frog) | | |
| AP00863 | Ref, Temporin- | FLPIVGKLLSGLSGLL | 2643 |
| | ALa (XXA, frog) | | |
| AP00864 | Ref, Temporin | FLPIVGRLISGLL | 2644 |
| | 1ARa (XXA, frog) | | |
| AP00865 | Ref, Temporin | FLPIIGQLLSGLL | 2645 |
| | 1AUa (XXA, | | |
| | Temporin-1AUa) | | |
| | (frog) | | |
| AP00866 | Ref, Temporin | FLPIIAKVLSGLL | 2646 |
| | 1Bya (XXA, | | |
| | Temporin-1Bya, | | |
| | frog) | | |
| AP00867 | Ref, Temporin 1Ec | FLPVIAGLLSKLF | 2647 |
| | (XXA, frog) | | |
| AP00869 | Ref, Temporin 1Ja | ILPLVGNLLNDLL | 2648 |
| | (XXA, Temporin- | | |
| | 1Ja, frog) | | |
| AP00873 | Ref, Temporin 1Pra | ILPILGNLLNGLL | 2649 |
| | (XXA, frog) | | |
| AP00874 | Ref, Temporin 1VE | FLPLVGKILSGLI | 2650 |
| | (XXA, frog) | | |
| AP00875 | Ref, Temporin 1Va | FLSSIGKILGNLL | 2651 |
| | (XXA, frog) | | |
| AP00876 | Ref, Temporin 1Vb | FLSIIAKVLGSLF | 2652 |
| | (XXA, frog) | | |
| AP00877 | Ref, Brevinin-1Ja | FLGSLIGAAIPAIKQLLGLKK | 2653 |
| | (frog) | | |
| AP00878 | Ref, Brevinin- | FLPILASLAAKFGPKLFCLVTKKC | 2654 |
| | 1BYa (frog) | | |
| AP00884 | Ref, Ixosin-B (tick) | QLKVDLWGTRSGIQPEQHSSGKSD | 2655 |
| | | VRRWRSRY | |
| AP00885 | Ref, Brevinin- | FLPILASLAAKLGPKLFCLVTKKC | 2656 |
| | 1BYb (frog) | | |
| AP00886 | Ref, Brevinin- | FLPILASLAATLGPKLLCLITKKC | 2657 |
| | 1BYc (frog) | | |
| AP00887 | Ref, Brevinin- | GILSTFKGLAKGVAKDLAGNLLDK | 2658 |
| | 2BYa (frog) | FKCKITGC | |
| AP00888 | Ref, Brevinin- | GIMDSVKGLAKNLAGKLLDSLKC | 2659 |
| | 2BYb (frog) | KITGC | |
| AP00891 | Ref, Pilosulin 3 | IIGLVSKGTCVLVKTVCKKVLKQG | 2660 |
| | (Myr b III)(ants) | | |
| AP00892 | Ref, Pilosulin 4 | PDITKLNIKKLTKATCKVISKGASM | 2661 |
| | (Myr b IV)(ants) | CKVLFDKKKQE | |
| AP00893 | Ref, Pilosulin 5 | DVKGMKKAIKGILDCVIEKGYDKL | 2662 |
| | (Myr b III)(ants) | AAKLKKVIQQLWE | |
| AP00894 | Ref, Ocellatin 4 | GLLDFVTGVGKDIFAQLIKQI | 2663 |
| | (XXA, frog) | | |
| AP00895 | Ref, OH-CATH | KRFKKFFKKLKNSVKKRAKKFFK | 2664 |
| | (snake cathelicidin, | KPRVIGVSIPF | |
| | reptile cathelicidin, | | |
| | or elapid | | |
| | cathelicidins) | | |
| AP00896 | Ref, BF-CATH | KRFKKFFKKLKKSVKKRAKKFFK | 2665 |
| | (snake cathelicidin) | KPRVIGVSIPF | |
| AP00897 | Ref, NA-CATH | KRFKKFFKKLKNSVKKRAKKFFK | 2666 |
| | (snake cathelicidin) | KPKVIGVTFPF | |
| AP00898 | Ref, Temporin-1Sa | FLSGIVGMLGKLF | 2667 |
| | (XXA, frog) | | |
| AP00899 | Ref, Temporin-1Sb | FLPIVTNLLSGLL | 2668 |
| | (XXA, frog) | | |
| AP00900 | Ref, Temporin-1Sc | FLSHIAGFLSNLF | 2669 |
| | (XXA, frog) | | |
| AP00913 | Ref, Ib-AMP1 | EWGRRCCGWGPGRRYCVRWC | 2670 |
| | (IbAMP1, plant | | |
| | defensin) | | |
| AP00914 | Ref, Ib-AMP2 | QYGRRCCNWGPGRRYCKRWC | 2671 |
| | (IBAMP2, plant | | |
| | defensin) | | |
| AP00915 | Ref, Ee-CBP | QQCGRQAGNRRCANNLCCSQYGY | 2672 |
| | (EeCBP, plant | CGRTNEYCCTSQGCQSQCRRCG | |
| | defensin, hevein- | | |
| | type, E. europaeus | | |
| | chitin-binding | | |
| | protein) | | |
| AP00916 | Ref, Pa-AMP1 | AGCIKNGGRCNASAGPPYCCSSYC | 2673 |
| | (PaAMP1, plant | FQIAGQSYGVCKNR | |
| | defensin, C6 type) | | |
| AP00917 | Ref, Pa-AMP2 | ACIKNGGRCVASGGPPYCCSNYCL | 2674 |
| | (PaAMP2, plant | QIAGQSYGVCKKH | |
| | defensin, C6 type) | | |
| AP00924 | Ref, Ornithodoros | GYGCPFNQYQCHSHCRGIRGYKG | 2675 |
| | defensin B (soft | GYCTGRFKQTCKCY | |
| | ticks) | | |
| AP00925 | Ref, Ornithodoros | GYGCPFNQYQCHSHCSGIRGYKGG | 2676 |
| | defensin C (soft | YCKGLFKQTCNCY | |
| | ticks) | | |
| AP00926 | Ref, Ornithodoros | GFGCPFNQYECHAHCSGVPGYKG | 2677 |
| | defensin D (soft | GYCKGLFKQTCNCY | |
| | ticks) | | |
| AP00927 | Ref, | IYFIADKMGIQLAPAWYQDIVNWV | 2678 |
| | Butyrivibriocin | SAGGTLTTGFAIIVGVTVPAWIAEA | |
| | AR10 (XXC, class | AAAFGIASA | |
| | IV bacteriocin, | | |
| | gram-positive | | |
| | bacteria) | | |
| AP00929 | Ref, AS-48 | ASLQFLPIAHMAKEFGIPAAVAGT | 2679 |
| | (enterocin 4, XXC, | VINVVEAGGWVTTIVSILTAVGSG | |
| | class IV bacteriocin | GLSLLAAAGRESIKAYLKKEIKKK | |
| | or class IId | GKRAVIAW | |
| | bacteriocin, Gram- | | |
| | positive bacteria) | | |
| AP00930 | Ref, Reutericin 6 | IYWIADQFGIHLATGTARKLLDAM | 2680 |
| | (XXC, XXD1, | ASGASLGTAFAAILGVTLPAWALA | |
| | class IV | AAGALGATAA | |
| | bacteriocin, Gram- | | |
| | positive bacteria) | | |
| AP00931 | Ref, Uberolysin | LAGYTGIASGTAKKVVDAIDKGAA | 2681 |
| | (XXC, class IV | AFVIISIISTVISAGALGAVSASADFI | |
| | bacteriocin, Gram- | ILTVKNYISRNLKAQAVIW | |
| | positive bacteria) | | |
| AP00932 | Ref, Acidocin B | IYWIADQFGIHLATGTARKLLDAV | 2682 |
| | (XXC, class IV | ASGASLGTAFAAILGVTLPAWALA | |
| | bacteriocin, Gram- | AAGALGATAA | |
| | positive bacteria) | | |
| AP00980 | Ref, Phormia | ATCDLLSGTGINHSACAAHCLLRG | 2683 |
| | defensin B (insect | NRGGYCNRKGVCVCRN | |
| | defensin B) | | |
| AP00990 | Ref, Pth-St1 (plant | RNCESLSHRFKGPCTRDSN | 2684 |
| | defensin) | | |
| AP00991 | Ref, Snakin-1 | GSNFCDSKCKLRCSKAGLADRCLK | 2685 |
| | (StSN1, plant | YCGICCEECKCVPSGTYGNKHECP | |
| | defensin) | CYRDKKNSKGKSKCP | |
| AP00992 | Ref, Snakin-2 | YSYKKIDCGGACAARCRLSSRPRL | 2686 |
| | (StSN2, plant | CNRACGTCCARCNCVPPGTSGNTE | |
| | defensin) | TCPCYASLTTHGNKRKCP | |
| AP00993 | Ref, So-D2 (S. oleracea | GIFSSRKCKTPSKTFKGICTRDSNC | 2687 |
| | defensin | DTSCRYEGYPAGDCKGIRRRCMCS | |
| | D2, plant defensin) | KPC | |
| AP00994 | Ref, So-D6 (S. oleracea | GIFSNMYARTPAGYFRGP | 2688 |
| | defensin | | |
| | D6, plant defensin) | | |
| AP00997 | Ref, Nisin Q | ITSISLCTPGCKTGVLMGCNLKTAT | 2689 |
| | (lantibiotic, | CNCSVHVSK | |
| | bacteriocins, | | |
| | bacteria) | | |
| AP01008 | Ref, Tachystatin | YSRCQLQGFNCVVRSYGLPTIPCC | 2690 |
| | A1 (BBS, | RGLTCRSYFPGSTYGRCQRF | |
| | horseshoe crabs) | | |
| AP01009 | Ref, Tachystatin C | DYDWSLRGPPKCATYGQKCRTWS | 2691 |
| | (BBS, horseshoe | PRNCCWNLRCKAFRCRPR | |
| | crabs) | | |
| AP01012 | Ref, Latarcin 3a | SWKSMAKKLKEYMEKLKQRA | 2692 |
| | (Ltc3a, XXA, | | |
| | BBM, spider) | | |
| AP01013 | Ref, Latarcin 3b | SWASMAKKLKEYMEKLKQRA | 2693 |
| | (Ltc3b, XXA, | | |
| | BBM, spider) | | |
| AP01014 | Ref, Latarcin 4a | GLKDKFKSMGEKLKQYIQTWKAKF | 2694 |
| | (Ltc4a, XXA, | | |
| | BBM, spider) | | |
| AP01015 | Ref, Latarcin 4b | SLKDKVKSMGEKLKQYIQTWKAKF | 2695 |
| | (Ltc4b, XXA, | | |
| | BBM, spider) | | |
| AP01016 | Ref, Latarcin 5 | GFFGKMKEYFKKFGASFKRRFANL | 2696 |
| | (Ltc5, XXA, BBM, | KKRL | |
| | spider) | | |
| AP01018 | Ref, Latarcin 6a | QAFQTFKPDWNKIRYDAMKMQTS | 2697 |
| | (Ltc6a, BBM, | LGQMKKRFNL | |
| | spider) | | |
| AP01019 | Ref, Latarcin 7 | GETFDKLKEKLKTFYQKLVEKAED | 2698 |
| | (Ltc7, BBM, | LKGDLKAKLS | |
| | spider) | | |
| AP01049 | Ref, Kalata B2 | VCGETCFGGTCNTPGCSCTWPICT | 2699 |
| | (plant cyclotides, | RDGLP | |
| | XXC) | | |
| AP01141 | Ref, Cryptdin-6 | LRDLVCYCRARGCKGRERMNGTC | 2700 |
| | (Crp6, animal | RKGHLLYMLCCR | |
| | defensin, alpha, | | |
| | mouse) | | |
| AP01142 | Ref, Rabbit kidney | KPYCSCKWRCGIGEEEKGICHKFPI | 2701 |
| | defensin RK-2 | VTYVCCRRP | |
| | (animal defensin, | | |
| | alpha-defensin) | | |
| AP01146 | Ref, Gallinacin 6 | DTLACRQSHGSCSFVACRAPSVDI | 2702 |
| | (Gal6, Gal-6, avian | GTCRGGKLKCCKWAPSS | |
| | beta defensin, bird) | | |
| AP01147 | Ref, Gallinacin 8 | DTVACRIQGNFCRAGACPPTFTISG | 2703 |
| | (Gal8, Gal-8, avian | QCHGGLLNCCAKIPAQ | |
| | beta defensin, bird) | | |
| AP01148 | Ref, Gallinacin 3 | IATQCRIRGGFCRVGSCRFPHIAIGK | 2704 |
| | (Gal3, Gal-3, avian | CATFISCCGRAY | |
| | beta defensin, bird) | | |
| AP01152 | Ref, Lactococcin Q | SIWGDIGQGVGKAAYWVGKAMG | 2705 |
| | (class IIb | NMSDVNQASRINRKKKH | |
| | bacteriocin, | | |
| | bacteria, chain a. | | |
| | For chain b, see | | |
| | Info) | | |
| AP01155 | Ref, Enterocin | ESVFSKIGNAVGPAAYWILKGLGN | 2706 |
| | 1071 (Ent1071A, | MSDVNQADRINRKKH | |
| | class IIb | | |
| | bacteriocin, | | |
| | bacteria; chain B is | | |
| | Enterocin 1071B or | | |
| | Ent1071B, see | | |
| | info) | | |
| AP01156 | Ref, Plantaricin S | NKLAYNMGHYAGKATIFGLAAW | 2707 |
| | (chain a, class IIb | ALLA | |
| | bacteriocin, | | |
| | bacteria) | | |
| AP01159 | Ref, Hinnavin II | KWKIFKKIEHMGQNIRDGLIKAGP | 2708 |
| | (Hin II, XXA, | AVQVVGQAATIYK | |
| | insect) | | |
| AP01160 | Ref, NK-2 | KILRGLCKKIMRSFLRRISWDILTG | 2709 |
| | (synthetic, XXA) | KK | |
| AP01167 | Ref, Plantaricin | LTTKLWSSWGYYLGKKARWNLK | 2710 |
| | NC8 (PLNC8, | HPYVQF | |
| | chain a, class IIb | | |
| | bacteriocin, | | |
| | bacteria. For chain | | |
| | b, see Info) | | |
| AP01168 | Ref, Carnocyclin A | LVAYGIAQGTAEKVVSLINAGLTV | 2711 |
| | (a circular | GSIISILGGVTVGLSGVFTAVKAAI | |
| | bacteriocin, XXC, | AKQGIKKAIQL | |
| | bacteria) | | |
| AP01169 | Ref, Lactacin F | NRWGDTVLSAASGAGTGIKACKSF | 2712 |
| | (LafX, class IIb | GPWGMAICGVGGAAIGGYFGYTHN | |
| | bacteriocin, | | |
| | bacteria. For LafA, | | |
| | see Info) | | |
| AP01170 | Ref, Brochocin C | YSSKDCLKDIGKGIGAGTVAGAAG | 2713 |
| | (BrcC, chain BrcA, | GGLAAGLGAIPGAFVGAHFGVIGG | |
| | class IIb | SAACIGGLLGN | |
| | bacteriocin, | | |
| | bacteria. For BrcB, | | |
| | see Info) | | |
| AP01171 | Ref, Thermophilin | YSGKDCLKDMGGYALAGAGSGAL | 2714 |
| | 13 (chain a ThmA, | WGAPAGGVGALPGAFVGAHVGAI | |
| | 2-chain class IIb | AGGFACMGGMIGNKFN | |
| | bacteriocin, | | |
| | bacteria. For chain | | |
| | B ThmB, see Info) | | |
| AP01172 | Ref, ABP-118 | KRGPNCVGNFLGGLFAGAAAGVP | 2715 |
| | (chain a: | LGPAGIVGGANLGMVGGALTCL | |
| | Abp118alpha, class | | |
| | IIb bacteriocin, | | |
| | bacteria. For chain | | |
| | b: Abp118beta, see | | |
| | Info) | | |
| AP01173 | Ref, Salivaricin P | KRGPNCVGNFLGGLFAGAAAGVP | 2716 |
| | (chain a: Sln1; | LGPAGIVGGANLGMVGGALTCL | |
| | class IIb | | |
| | bacteriocin, | | |
| | bacteria. For chain | | |
| | b: Sln2, see Info) | | |
| AP01174 | Ref, Mutacin IV | KVSGGEAVAAIGICATASAAIGGL | 2717 |
| | (chain a: NlmA, | AGATLVTPYCVGTWGLIRSH | |
| | class IIb | | |
| | bacteriocin, | | |
| | bacteria. For chain | | |
| | b: NLmB, see Info) | | |
| AP01175 | Ref, Lactocin 705 | GMSGYIQGIPDFLKGYLHGISAAN | 2718 |
| | (chain a: | KHKKGRLGY | |
| | Lac705alpha; class | | |
| | IIb bacteriocin, | | |
| | bacteria. For chain | | |
| | b: Lac705beta, see | | |
| | Info) | | |
| AP01176 | Ref, Cytolysin | TTPACFTIGLGVGALFSAKFC | 2719 |
| | (CylLS, bacteria; | | |
| | Chain B: CylLL) | | |
| AP01177 | Ref, Plantaricin EF | FNRGGYNFGKSVRHVVDAIGSVA | 2720 |
| | (chain a. PlnE, | GILKSIR | |
| | class IIb | | |
| | bacteriocin, | | |
| | bacteria. Chain b: | | |
| | PlnF) | | |
| AP01178 | Ref, Plantaricin JK | GAWKNFWSSLRKGFYDGEAGRAI | 2721 |
| | (chain a: PlnJ; class | RR | |
| | IIb bacteriocin, | | |
| | bacteria. Chain b: | | |
| | PlnK) | | |
| AP01179 | Ref, Enterocin SE- | NGVYCNKQKCWVDWSRARSEIID | 2722 |
| | K4 (class IIa | RGVKAYVNGFTKVLGGIGGR | |
| | bacteriocin, | | |
| | bacteria) | | |
| AP01180 | Ref, Acidocin | NPKVAHCASQIGRSTAWGAVSGA | 2723 |
| | J1132 (class IIb | | |
| | bacteriocin, | | |
| | bacteria) | | |
| AP01181 | Ref, Curvaticin | AYPGNGVHCGKYSCTVDKQTAIG | 2724 |
| | L442 (class IIa | NIGNNAA | |
| | bacteriocin, | | |
| | bacteria) | | |
| AP01182 | Ref, Bacteriocin 32 | FTPSVSFSQNGGVVEAAAQRGYIY | 2725 |
| | (Bac 32, class IIa | KKYPKGAKVPNKVKMLVNIRGKQ | |
| | bacteriocin, | TMRTCYLMSWTASSRTAKYYYYI | |
| | bacteria) | | |
| AP01183 | Ref, Bacteriocin 43 | ATYYGNGLYCNKEKCWVDWNQA | 2726 |
| | (Bac 43, | KGEIGKIIVNGWVNHGPWAPRR | |
| | bacteriocin, | | |
| | bacteria) | | |
| AP01184 | Ref, Bacteriocin T8 | ATYYGNGLYCNKEKCWVDWNQA | 2727 |
| | (Bac T8, class IIa | KGEIGKIIVNGWVNHGPWAPRR | |
| | bacteriocin, | | |
| | bacteria) | | |
| AP01185 | Ref, Enterocin B | ENDHRMPNNLNRPNNLSKGGAKC | 2728 |
| | (EntB, bacteriocin, | GAAIAGGLFGIPKGPLAWAAGLAN | |
| | bacteria) | VYSKCN | |
| AP01186 | Ref, Acidocin A | KTYYGTNGVHCTKKSLWGKVRLK | 2729 |
| | (bacteriocin, | NVIPGTLCRKQSLPIKQDLKILLGW | |
| | bacteria) | ATGAFGKTFH | |
| AP01187 | Ref, Enterocin Q | MNFLKNGIAKWMTGAELQAYKK | 2730 |
| | (EntQ, class IIc | KYGCLPWEKISC | |
| | bacteriocin, | | |
| | leaderless, i.e. no | | |
| | signal peptide, | | |
| | bacteria) | | |
| AP01188 | Ref, Enterocin | MLAKIKAMIKKFPNPYTLAAKLTT | 2731 |
| | EJ97 (EntEJ97, | YEINWYKQQYGRYPWERPVA | |
| | class IIc | | |
| | bacteriocin, | | |
| | leaderless, i.e. no | | |
| | signal peptide, | | |
| | bacteria) | | |
| AP01189 | Ref, Enterocin RJ- | APAGLVAKFGRPIVKKYYKQIMQF | 2732 |
| | 11 (EntRJ-11, class | IGEGSAINKIIPWIARMWRT | |
| | IIc bacteriocin, | | |
| | leaderless, i.e. no | | |
| | signal sequence, | | |
| | bacteria) | | |
| AP01190 | Ref, Enterocin L50 | MGAIAKLVAKFGWPIVKKYYKQI | 2733 |
| | (old name: | MQFIGEGWAINKIIEWIKKHI | |
| | pediocin L50, | | |
| | EntL50A, a two- | | |
| | chain class IIc | | |
| | bacteriocin, | | |
| | leaderless, i.e. no | | |
| | signal peptide, | | |
| | bacteria. The | | |
| | sequence of | | |
| | EntL50B is | | |
| | provided in Info) | | |
| AP01191 | Ref, MR10 | MGAIAKLVAKFGWPIVKKYYKQI | 2734 |
| | (MR10A, class IIc | MQFIGEGWAINKIIDWIKKHI | |
| | bacteriocin, | | |
| | leaderless, i.e. no | | |
| | signal peptide, | | |
| | bacteria. For the | | |
| | sequence of chain | | |
| | b, see Info) | | |
| AP01192 | Ref, Halocin S8 | SDCNINSNTAADVILCFNQVGSCA | 2735 |
| | (HalS8, | LCSPTLVGGPVP | |
| | microhalocin, | | |
| | archaeocins, | | |
| | archeae) | | |
| AP01193 | Ref, Halocin C8 | DIDITGCSACKYAAGQVCTIGCSA | 2736 |
| | (HalC8, | AGGFICGLLGITIPVAGLSCLGFVEI | |
| | microhalocins, | VCTVADEYSGCGDAVAKEACNRA | |
| | archaeocins, | GLC | |
| | archaea) | | |
| AP01194 | Ref, Lacticin 3147 | CSTNTFSLSDYWGNNGAWCTLTH | 2737 |
| | (chain A1, a two- | ECMAWCK | |
| | chain lantibiotic, | | |
| | bacteriocin, | | |
| | bacteria. The | | |
| | sequence of chain | | |
| | A2 is given in Info; | | |
| | XXD3) | | |
| AP01195 | Ref, Salivaricin A | KRGSGWIATITDDCPNSVFVCC | 2738 |
| | (SalA, lantibiotic, | | |
| | bacteriocin, | | |
| | bacteria) | | |
| AP01196 | Ref, Microcin E492 | ATYYGNGLYCNKEKCWVDWNQA | 2739 |
| | (MccE492, class | KGEIGKIIVNGWVNHGPWAPRR | |
| | IIb microcins, | | |
| | bacteriocin, | | |
| | bacteria; BBM; u- | | |
| | MccE492, | | |
| | siderophore | | |
| | peptide, BBI, XXG) | | |
| AP01197 | Ref, Hiracin JM79 | ATYYGNGLYCNKEKCWVDWNQA | 2740 |
| | (HirJM79, a Sec- | KGEIGKIIVNGWVNHGPWAPRR | |
| | dependent class II | | |
| | bacteriocin, | | |
| | bacteria) | | |
| AP01198 | Ref, Thermophilin | LSCDEGMLAVGGLGAVGGPWGA | 2741 |
| | 9 (BlpDst, class IIb | AVGVLVGAALYCF | |
| | bacteriocin, | | |
| | bacteria. beta- | | |
| | chains: BlpUst, | | |
| | BlpEst, BapFst) | | |
| AP01199 | Ref, Penocin A | KYYGNGVHCGKKTCYVDWGQAT | 2742 |
| | (PenA, class IIa | ASIGKIIVNGWTQHGPWAHR | |
| | bacteriocin, | | |
| | bacteria) | | |
| AP01200 | Ref, Salivaricin B | GGGVIQTISHECRMNSWQFLFTCCS | 2743 |
| | (SalB, lantibotic, | | |
| | bacteriocin, | | |
| | bacteria) | | |
| AP01201 | Ref, Lacticin 481 | KGGSGVIHTISHECNMNSWQFVFT | 2744 |
| | (lantibiotic, class I | CCS | |
| | bacteriocin, | | |
| | bacteria) | | |
| AP01202 | Ref, Bacteriocin | KGGSGVIHTISHEVIYNSWNFVFTC | 2745 |
| | J46 (BacJ46, | CS | |
| | bacteriocin, | | |
| | bacteria) | | |
| AP01203 | Ref, Nukacin A | KKKSGVIPTVSHDCHMNSFQFVFT | 2746 |
| | (NucA, Nukacin | CCS | |
| | ISK-1, NukISK-1, | | |
| | bacteriocin, | | |
| | bacteria) | | |
| AP01204 | Ref, Streptococcin | GKNGVFKTISHECHLNTWAFLATC | 2747 |
| | A-FF22 | CS | |
| | (LANTIBIOTIC, | | |
| | class I bacteriocin, | | |
| | bacteria) | | |
| AP01210 | Ref, Jelleine-I | PFKLSLHL | 2748 |
| | (honeybees, insect, | | |
| | XXA) | | |
| AP01211 | Ref, Jelleine-II | TPFKLSLHL | 2749 |
| | (honeybees, insect, | | |
| | XXA) | | |
| AP01212 | Ref, Jelleine-III | EPFKLSLHL | 2750 |
| | (honeybees, insect, | | |
| | XXA) | | |
| AP01213 | Ref, | EFRGSIVIQGTKEGKSRPSLDIDYK | 2751 |
| | Hymenoptaecin | QRVYDKNGMTGDAYGGLNIRPGQ | |
| | (honeybees, insect | PSRQHAGFEFGKEYKNGFIKGQSE | |
| | defensin, XXcooh) | VQRGPGGRLSPYFGINGGFRF | |
| AP01216 | Ref, Ascaphin-1 | GFRDVLKGAAKAFVKTVAGHIAN | 2752 |
| | (frog, XXA) | | |
| AP01218 | Ref, Ascaphin-3 | GFRDVLKGAAKAFVKTVAGHIANI | 2753 |
| | (frog) | | |
| AP01220 | Ref, Ascaphin-5 | GIKDWIKGAAKKLIKTVASNIANQ | 2754 |
| | (frog) | | |
| AP01222 | Ref, Ascaphin-7 | GFKDWIKGAAKKLIKTVASSIANQ | 2755 |
| | (frog) | | |
| AP01223 | Ref, Ascaphin-8 | GFKDLLKGAAKALVKTVLF | 2756 |
| | (frog, XXA) | | |
| AP01226 | Ref, Microcin C7 | MRTGNAD | 2757 |
| | (MccC7, microcin | | |
| | C51, MccC51, | | |
| | class I microcins, | | |
| | bacteriocins, | | |
| | bacteria. Others: | | |
| | MccA; XXamp; | | |
| | BBPe) | | |
| AP01227 | Ref, Microcin B17 | VGIGGGGGGGGGGSCGGQGGGCG | 2758 |
| | (MccB17, class I | GCSNGCSGGNGGSGGSGSHI | |
| | microcins, | | |
| | bacteriocins, Gram- | | |
| | negative bacteria; | | |
| | BBPe) | | |
| AP01228 | Ref, Microcin V | ASGRDIAMAIGTLSGQFVAGGIGA | 2759 |
| | (MccV, (old name) | AAGGVAGGAIYDYASTHKPNPAM | |
| | Colicin V, ColV; | SPSGLGGTIKQKPEGIPSEAWNYAA | |
| | class II microcins, | GRLCNWSPNNLSDVCL | |
| | bacteriocins, Gram- | | |
| | negative bacteria) | | |
| AP01229 | Ref, Microcin L | GDVNWVDVGKTVATNGAGVIGG | 2760 |
| | (MccL, class IIa | AFGAGLCGPVCAGAFAVGSSAAV | |
| | microcins, | AALYDAAGNSNSAKQKPEGLPPEA | |
| | bacteriocins, Gram- | WNYAEGRMCNWSPNNLSDVCL | |
| | negative bacteria) | | |
| AP01230 | Ref, Microcin M | DGNDGQAELIAIGSLAGTFISPGFG | 2761 |
| | (MccM, class IIb | SIAGAYIGDKVHSWATTATVSPSM | |
| | microcins, | SPSGIGLSSQFGSGRGTSSASSSAGS | |
| | bacteriocins, Gram- | GS | |
| | negative bacteria) | | |
| AP01231 | Ref, Microcin H47 | GGAPATSANAAGAAAIVGALAGIP | 2762 |
| | (MccH47, class IIb | GGPLGVVVGAVSAGLTTGIGSTVG | |
| | microcins, | SGSASSSAGGGS | |
| | bacteriocins, Gram- | | |
| | negative bacteria) | | |
| AP01232 | Ref, Microcin I47 | MNLNGLPASTNVIDLRGKDMGTYI | 2763 |
| | (MccI47, class IIb | DANGACWAPDTPSIIMYPGGSGPS | |
| | microcins, | YSMSSSTSSANSGS | |
| | bacteriocins, Gram- | | |
| | negative bacteria) | | |

| | | |
|---|---|---|
| Aibellin | *Ac U A U A U A Q U F U G U U P V U U E E | 2764 |
| | [NHC(CH2Ph)HCH2NHCH2CH2]OH | |
| Alamethicin_F-30 | *Ac U P U A U A Q U V U G L U P V U U E Q F | 2765 |
| | OH | |
| Alamethicin_F-50 | * Ac U P U A U A Q U V U G L U P V U U Q Q F | 2766 |
| | OH | |
| Alamethicin_II | * Ac U P U A U U Q U V U G L U P V U U E Q F | 2767 |
| | OH | |
| Ampullosporin | * Ac W A U U L U Q U U U Q L U Q L OH | 2768 |
| Ampullosporin_B | * Ac W A U U L U Q A U U Q L U Q L OH | 2769 |
| Ampullosporin_C | * Ac W A U U L U Q U A U Q L U Q L OH | 2770 |
| Ampullosporin_D | * Ac W A U U L U Q U U A Q L U Q L OH | 2771 |
| Ampullosporin_E1 | * Ac W A U U L U Q A U U Q L A Q L OH | 2772 |
| Ampullosporin_E2 | * Ac W A U U L U Q U A A Q L U Q L OH | 2773 |
| Ampullosporin_E3 | * Ac W A U U L U Q U U A Q L A Q L OH | 2774 |
| Ampullosporin_E4 | * Ac W A U U L U Q A A U Q L U Q L OH | 2775 |
| Antiamoebin_I | * Ac F U U U J G L U U O Q J O U P F OH | 2776 |
| Antiamoebin_II | * Ac F U U U J G L U U O Q J P U P F OH | 2777 |
| Antiamoebin_III | * Ac F U U U U G L U U O Q J O U P F OH | 2778 |
| Antiamoebin_IV | * Ac F U U U J G L U U O Q J O U P F OH | 2779 |
| Antiamoebin_V | * Ac F U U U J A L U U O Q J O U P F OH | 2780 |
| Antiamoebin_VI | * Ac F U U U U G L U U O Q U O U P F OH | 2781 |
| Antiamoebin_VII | * Ac F A U J U G L U U O Q J O U P F OH | 2782 |
| Antiamoebin_VIII | * Ac F U U U J G L U U O Q U O U P F OH | 2783 |
| Antiamoebin_IX | * Ac F U A U J G L U U O Q J O U P F OH | 2784 |
| Antiamoebin_X | * Ac F U U U J G L J U O Q U O U P F OH | 2785 |
| Antiamoebin_XI | * Ac F U U U U A L U U O Q J O U P F OH | 2786 |
| Antiamoebin_XII | * Ac F U U U U G L A U O Q J O U P F OH | 2787 |
| Antiamoebin_XIII | * Ac V U U U U G L U U O Q J O U P F OH | 2788 |
| Antiamoebin_XIV | * Ac V U U U V G L U U O Q J O U P F OH | 2789 |
| Antiamoebin_XV | * Ac L U U U U G L U U O Q J O U P F OH | 2790 |
| Antiamoebin_XVI | * Ac L U U U J G L U U O Q J O U P F OH | 2791 |
| Atroviridin_A | * Ac U P U A U A Q U V U G L U P V U U Q Q F | 2792 |
| | OH | |
| Atroviridin_B | * Ac U P U A U A Q U V U G L U P V U J Q Q F | 2793 |
| | OH | |
| Atroviridin_C | * Ac U P U A U U Q U V U G L U P V U J Q Q F | 2794 |
| | OH | |
| Bergofungin_A | * Ac V U U U V G L U U O Q J O U F OH | 2795 |
| Bergofungin_B | * Ac V U U U V G L V U O Q U O U F OH | 2796 |
| Bergofungin_C | * Ac V U U U V G L U U O Q U O U F OH | 2797 |
| Bergofungin_D | * Ac V U U V G L U U O Q U O U F OH | 2798 |
| Boletusin | * Ac F U A U J L Q G U U A A U P U U U Q W | 2799 |
| | OH | |
| Cephaibol_A | * Ac F U U U U G L J U O Q J O U P F OH | 2800 |
| Cephaibol_A2 | * Ac F U U U U A L J U O Q J O U P F OH | 2801 |
| Cephaibol_B | * Ac F U U U J G L J U O Q J O U P F OH | 2802 |
| Cephaibol_C | * Ac F U U U U G L J U O Q U O U P F OH | 2803 |
| Cephaibol_D | * Ac F U U U U G L U U O Q U O U P F OH | 2804 |
| Cephaibol_E | * Ac F U U U U G L U U O Q J O U P F OH | 2805 |
| Cephaibol_P | * Ac F J Q U I T U L U O Q U O U P F S OH | 2806 |
| Cephaibol_Q | * Ac F J Q U I T U L U P Q U O U P F S OH | 2807 |
| Cervinin_1 | * Ac L U P U L U P A U P V L OH | 2808 |
| Cervinin_2 | * Ac L U P U L U P A U P V L OCOCH3 | 2809 |
| Chrysospermin_A | * Ac F U S U U L Q G U U A A U P U U U Q W | 2810 |
| | OH | |
| Chrysospermin_B | * Ac F U S U U L Q G U U A A U P J U U Q W | 2811 |
| | OH | |
| Chrysospermin_C | * Ac F U S U J L Q G U U A A U P U U U Q W | 2812 |
| | OH | |
| Chrysospermin_D | * Ac F U S U J L Q G U U A A U P J U U Q W | 2813 |
| | OH | |
| Clonostachin | * Ac U O L J O L J O U J U O J I | 2814 |
| | O[CH(CH(OH)CH2OH)CH(OH)CH(OH)CH2]OH | |
| Emerimicin_II_A | * Ac W I Q U I T U L U O Q U O U P F OH | 2815 |
| Emerimicin_II_B | * Ac W I Q J I T U L U O Q U O U P F OH | 2816 |
| Emerimicin_III | * Ac F U U U V G L U U O Q J O U F OH | 2817 |
| Emerimicin_IV | * Ac F U U U V G L U U O Q J O A F OH | 2818 |
| Harzianin_HB_I | * Ac U N L I U P J L U P L OH | 2819 |
| Harzianin_HC_I | * Ac U N L U P S V U P U L U P L OH | 2820 |
| Harzianin_HC_III | * Ac U N L U P S V U P J L U P L OH | 2821 |
| Harzianin_HC_IX | * Ac U N L U P A I U P J L U P L OH | 2822 |
| Harzianin_HC_VI | * Ac U N L U P A V U P U L U P L OH | 2823 |
| Harzianin_HC_VIII | * Ac U N L U P A V U P J L U P L OH | 2824 |
| Harzianin_HC_VIII | * Ac U N L U P A V U P J L U P L OH | 2825 |
| Harzianin_HC_X | * Ac U Q L U P A V U P J L U P L OH | 2826 |
| Harzianin_HC_XI | * Ac U N L U P S I U P U L U P L OH | 2827 |
| Harzianin_HC_XII | * Ac U N L U P S I U P J L U P L OH | 2828 |
| Harzianin_HC_XIII | * Ac U Q L U P S I U P J L U P L OH | 2829 |
| Harzianin_HC_XIV | * Ac U N L U P A I U P U L U P L OH | 2830 |
| Harzianin_HC_XV | * Ac U Q L U P A I U P J L U P L OH | 2831 |
| Harzianin_HK_VI | * Ac U N I I U P L L U P L OH | 2832 |
| Harzianin_PCU4 | * Ac U N L U P S I U P U L U P V OH | 2833 |
| Helioferin_A | * Fa P ZZ A U I I U U AAE | 2834 |
| Helioferin_B | * Fa P ZZ A U I I U U AMAE | 2835 |
| Heptaibin | * Ac F U U U V G L U U O Q U O U F OH | 2836 |
| Hypelcin_A | * Ac U P U A U U Q L U G U U U P V U U Q Q L | 2837 |
| | OH | |
| Hypelcin_A_I | * Ac U P U A U U Q U L U G U U P V U U Q Q L | 2838 |
| | OH | |
| Hypelcin_A_II | * Ac U P U A U A Q U L U G U U P V U U Q Q L | 2839 |
| | OH | |
| Hypelcin_A_III | * Ac U P U A U U Q U L U G U U P V U U Q Q | 2840 |
| | [C7H16NO] | |
| Hypelcin_A_IV | * Ac U P U A U U Q U I U G U U P V U U Q Q L | 2841 |
| | OH | |
| Hypelcin_A-III | * Ac U P U A U U Q U L U G U U P V U J Q Q L | 2842 |
| | OH | |
| Hypelcin_A-IX | * Ac U P U A U U Q U I U G U U P V U J Q Q L | 2843 |
| | OH | |
| Hypelcin_A-V | * Ac U P U A U U Q U L U G U U P V U U Q Q I | 2844 |
| | OH | |
| Hypelcin_A-VI | * Ac U P U A U A Q U L U G U U P V U U Q Q I | 2845 |
| | OH | |
| Hypelcin_A-VII | * Ac U P U A U A Q U L U G U U P V U J Q Q L | 2846 |
| | OH | |
| Hypelcin_A-VIII | * Ac U P U A U A Q U I U G U U P V U U Q Q L | 2847 |
| | OH | |
| Hypelcin_B_I | * Ac U P U A U U Q U L U G U U P V U U E Q L | 2848 |
| | OH | |
| Hypelcin_B_II | * Ac U P U A U A Q U L U G U U P V U U E Q L | 2849 |
| | OH | |
| Hypelcin_B_III | * Ac U P U A U U Q U L U G U U P V U J E Q L | 2850 |
| | OH | |
| Hypelcin_B_IV | * Ac U P U A U U Q U I U G U U P V U U E Q L | 2851 |
| | OH | |
| Hypelcin_B_V | * Ac U P U A U U Q U L U G U U P V U U E Q I | 2852 |
| | OH | |
| Hypomurocin_A_I | * Ac U Q V V U P L L U P L OH | 2853 |
| Hypomurocin_A_II | * Ac J Q V V U P L L U P L OH | 2854 |
| Hypomurocin_A_III | * Ac U Q V L U P L I U P L OH | 2855 |
| Hypomurocin_A_IV | * Ac U Q I V U P L L U P L OH | 2856 |
| Hypomurocin_A_V | * Ac U Q I I U P L L U P L OH | 2857 |
| Hypomurocin_A_Va | * Ac U Q I L U P L I U P L OH | 2858 |
| Hypomurocin_B_I | * Ac U S A L U Q U V U G U U P L U U Q V OH | 2859 |
| Hypomurocin_B_II | * Ac U S A L U Q U V U G U U P L U U Q L OH | 2860 |
| Hypomurocin_B_IIIa | * Ac U A A L U Q U V U G U U P L U U Q V OH | 2861 |
| Hypomurocin_B_IIIb | * Ac U S A L U Q J V U G U U P L U U Q V OH | 2862 |
| Hypomurocin_B_IV | * Ac U S A L U Q U V U G J U P L U U Q V OH | 2863 |
| Hypomurocin_B_V | * Ac U S A L U Q U V U G J U P L U U Q L OH | 2864 |
| Leul_Zervamicin | * Ac L I Q J I T U L U O Q U O U P F OH | 2865 |
| Longibrachin_A_I | * Ac U A U A U A Q U V U G L U P V U U Q Q F | 2866 |
| | OH | |
| Longibrachin_A_II | * Ac U A U A U A Q U V U G L U P V U J Q Q F | 2867 |
| | OH | |
| Longibrachin_A_III | * Ac U A U A U U Q U V U G L U P V U U Q Q F | 2868 |
| | OH | |
| Longibrachin_A_IV | * Ac U A U A U U Q U V U G L U P V U J Q Q F | 2869 |
| | OH | |
| Longibrachin_B_II | * Ac U A U A U A Q U V U G L U P V U U E Q F | 2870 |
| | OH | |
| Longibrachin_B_III | * Ac U A U A U A Q U V U G L U P V U J E Q F | 2871 |
| | OH | |
| LP237_F5 | * Oc U P Y U Q Q U Zor Q A L OH | 2872 |
| LP237_F7 | * Ac U P F U Q Q U U Q A L OH | 2873 |
| LP237_F8 | * Oc U P F U Q Q U Zor Q A L OH | 2874 |
| NA_VII | * Ac U A A U J Q U U U S L U OCH3 | 2875 |
| Paracelsin_A | * Ac U A U A U A Q U V U G U U P V U U Q Q | 2876 |
| | F OH | |
| Paracelsin_B | * Ac U A U A U A Q U L U G U U P V U U Q Q F | 2877 |
| | OH | |
| Paracelsin_C | * Ac U A U A U U Q U V U G U U P V U U Q Q | 2878 |
| | F OH | |
| Paracelsin_D | * Ac U A U A U U Q U L U G U U P V U U Q Q F | 2879 |
| | OH | |
| Paracelsin_E | * Ac U A U A U A Q U L U G U A P V U U Q Q F | 2880 |
| | OH | |
| Peptaibolin | * Ac L U L U F OH | 2881 |
| Peptaivirin_A | * Ac F U A U J L Q G U U A A U P J U U Q W | 2882 |
| | OH | |
| Peptaivirin_B | * Ac F U S U J L Q G U U A A U P J U U Q F OH | 2883 |
| Polysporin_A | * Ac U P U A U U Q U V U G V U P V U U Q Q F | 2884 |
| | OH | |
| Polysporin_B | * Ac U P U A U U Q U V U G L U P V U U Q Q F | 2885 |
| | OH | |
| Polysporin_C | * Ac U P U A U U Q U I U G L U P V U U Q Q F | 2886 |
| | OH | |
| Polysporin_D | * Ac U P U A U U Q U I U G L U P V U V Q Q F | 2887 |
| | OH | |
| Pseudokinin_KLIII | * Ac U N I I U P L L U P NH2 | 2888 |
| Pseudokinin_KLVI | * Ac U N I I U P L V hydroxyketopiperazine | 2889 |
| Samarosporin_I | * Ac F U U U V G L U U O Q J O A F OH | 2890 |
| Samarosporin_II | * Ac F U U U V G L U U O Q J O U F OH | 2891 |
| Saturnisporin_SA_I | * Ac U A U A U A Q U L U G U U P V U U Q Q F | 2892 |
| | OH | |
| Saturnisporin_SA_II | * Ac U A U A U A Q U L U G U U P V U J Q Q F | 2893 |
| | OH | |
| Saturnisporin_SA_III | * Ac U A U A U U Q U L U G U U P V U U Q Q F | 2894 |
| | OH | |
| Saturnisporin_SA_IV | * Ac U A U A U U Q U L U G U U P V U J Q Q F | 2895 |
| | OH | |
| Stilbellin_I | * Ac F U U U V G L U U O Q J O A F OH | 2896 |
| Stilbellin_II | * Ac F U U U V G L U U O Q J O U F OH | 2897 |
| Stilboflavin_A_1 | * Ac U P U A U A Q U V U G U U P V U U E Q V | 2898 |
| | OH | |
| Stilboflavin_A_2 | * Ac U P U A U A Q U L U G U U P V U U E Q V | 2899 |
| | OH | |
| Stilboflavin_A_3 | * Ac U P U A U U Q U V U G U A P V U U E Q L | 2900 |
| | OH | |
| Stilboflavin_A_4 | * Ac U P U A U A Q U L U G U U P V U U E Q L | 2901 |
| | OH | |
| Stilboflavin_A_5 | * Ac U P U A U U Q U L U G U U P V U U E Q V | 2902 |
| | OH | |
| Stilboflavin_A_6 | * Ac U P U A U A Q U L U G U U P V U U E Q J | 2903 |
| | OH | |
| Stilboflavin_A_7 | * Ac U P U A U U Q U L U G U U P V U U E Q I | 2904 |
| | OH | |
| Stilboflavin_B_1 | * Ac U P U A U A Q U V U G U U P V U U Q Q | 2905 |
| | V OH | |
| Stilboflavin_B_2 | * Ac U P U A U A Q U L U G U U P V U U Q Q V | 2906 |
| | OH | |
| Stilboflavin_B_3 | * Ac U P U A U A Q U V U G U U P V U U Q Q L | 2907 |
| | OH | |
| Stilboflavin_B_4 | * Ac U P U A U A Q U L U G U U P V U U Q Q L | 2908 |
| | OH | |
| Stilboflavin_B_5 | * Ac U P U A U U Q U L U G U U P V U U Q Q V | 2909 |
| | OH | |
| Stilboflavin_B_6 | * Ac U P U A U U Q U V U G U U P V U U Q Q | 2910 |
| | V OH | |
| Stilboflavin_B_7 | * Ac U P U A U U Q U L U G U U P V U U Q Q L | 2911 |
| | OH | |
| Stilboflavin_B_8 | * Ac U P U A U U Q U V U G U U P V U U Q Q L | 2912 |
| | OH | |
| Stilboflavin_B_9 | * Ac U P U A U U Q U L U G U U P V U U Q Q I | 2913 |
| | OH | |
| Stilboflavin_B_10 | * Ac U P U A U U Q U V U G U U P V U U Q Q I | 2914 |
| | OH | |
| Suzukacillin | * Ac U A U A U A Q U U U G L U P V U U Q Q F | 2915 |
| | OH | |
| Trichobrachin_A-I | * Ac U N L L U P L U U P L OH | 2916 |
| Trichobrachin_A-II | * Ac U N L L U P V L U P V OH | 2917 |
| Trichobrachin_A-III | * Ac U N V L U P L L U P V OH | 2918 |
| Trichobrachin_A-IV | * Ac U N L V U P L L U P V OH | 2919 |
| Trichobrachin_B-I | * Ac U N L L U P V U V P L OH | 2920 |
| Trichobrachin_B-II | * Ac U N V L U P L U V P L OH | 2921 |
| Trichobrachin_B-III | * Ac U N L V U P L U V P L OH | 2922 |
| Trichobrachin_B-IV | * Ac U N L L U P L U V P V OH | 2923 |
| Trichocellin_TC-A-I | * Ac U A U A U A Q U L U G U U P V U U Q Q F | 2924 |
| | OH | |
| Trichocellin_TC-A-II | * Ac U A U A U A Q U L U G U U P V U J Q Q F | 2925 |
| | OH | |
| Trichocellin_TC-A-III | * Ac U A U A U A Q U I U G U U P V U U Q Q F | 2926 |
| | OH | |
| Trichocellin_TC-A-IV | * Ac U A U A U A Q U I U G U U P V U J Q Q F | 2927 |
| | OH | |
| Trichocellin_TC-A-V | * Ac U A U A U A Q U L U G L U P V U U Q Q F | 2928 |
| | OH | |
| Trichocellin_TC-A-VI | * Ac U A U A U A Q U L U G L U P V U J Q Q F | 2929 |
| | OH | |
| Trichocellin_TC-A- | * Ac U A U A U A Q U I U G L U P V U U Q Q F | 2930 |
| VII | OH | |
| Trichocellin_TC-A- | * Ac U A U A U A Q U I U G L U P V U J Q Q F | 2931 |
| VIII | OH | |
| Trichocellin_TC-B-I | * Ac U A U A U A Q U L U G U U P V U U E Q F | 2932 |
| | OH | |
| Trichocellin_TC-B-II | * Ac U A U A U A Q U L U G U U P V U J E Q F | 2933 |
| | OH | |
| Trichodecenin_TD_I | * (Z)-4-decenoyl G G L U G I L OH | 2934 |
| Trichodecenin_TD_II | * (Z)-4-decenoyl G G L U G L L OH | 2935 |
| Trichogin_A_IV | * Oc U G L U G G L U G I L OH | 2936 |
| Trichokindin_Ia | * Ac U S A U U Q J L U A U U P L U U Q I OH | 2937 |
| Trichokindin_Ib | * Ac U S A U J Q U L U A U U P L U U Q I OH | 2938 |
| Trichokindin_IIa | * Ac U S A U U Q U L U A J U P L U U Q I OH | 2939 |
| Trichokindin_IIb | * Ac U S A U J Q J L U A U U P L U U Q L OH | 2940 |
| Trichokindin_IIIa | * Ac U S A U U Q J L U A J U P L U U Q L OH | 2941 |
| Trichokindin_IIIb | * Ac U S A U J Q U L U A J U P L U U Q L OH | 2942 |
| Trichokindin_IV | * Ac U S A U J Q J L U A U U P L U U Q I OH | 2943 |
| Trichokindin_Va | * Ac U S A U U Q J L U A J U P L U U Q I OH | 2944 |
| Trichokindin_Vb | * Ac U S A U J Q U L U A J U P L U U Q I OH | 2945 |
| Trichokindin_VI | * Ac U S A U J Q J L U A J U P L U U Q L OH | 2946 |
| Trichokindin_VII | * Ac U S A U J Q J L U A J U P L U U Q I OH | 2947 |
| Trichokonin_Ia | * Ac U A U A U A Q U V U G L A P V U U Q Q F | 2948 |
| | OH | |
| Trichokonin_Ib | * Ac U G U A U A Q U V U G L U P V U U Q Q F | 2949 |
| | OH | |
| Trichokonin_IIa | * Ac U A U A U A Q U V U G L U P A U U Q Q F | 2950 |
| | OH | |
| Trichokonin_IIb | * Ac A A U A U A Q U V U G L U P V U U Q Q F | 2951 |
| | OH | |
| Trichokonin_IIc | * Ac U A A A U A Q U V U G L U P V U U Q Q F | 2952 |
| | OH | |
| Trichokonin_V | * Ac U A U A U Q U V U G L U P V U U Q Q F | 2953 |
| | OH | |
| Trichokonin_VII | * Ac U A U A U A Q U V U G L U P V U J Q Q F | 2954 |
| | OH | |
| Trichokonin_VIII | * Ac U A U A U U Q U V U G L U P V U U Q Q F | 2955 |
| | OH | |
| Trichokonin_IX | * Ac U A U A U A Q U V U G L U P V U J Q Q F | 2956 |
| | OH | |
| Tricholongin_BI | * Ac U G F U U Q U U U S L U P V U U Q Q L | 2957 |
| | OH | |
| Tricholongin_BII | * Ac U G F U U Q U U U S L U P V U J Q Q L | 2958 |
| | OH | |
| Trichopolyn_I | * Fa P ZZ A U U I A U U AMAE | 2959 |
| Trichopolyn_II | * Fa P ZZ A U U V A U U AMAE | 2960 |
| Trichopolyn_III | * Fa P ZZ A U U I A U A AMAE | 2961 |
| Trichopolyn_IV | * Fa P ZZ A U U V A U A AMAE | 2962 |
| Trichopolyn_V | * Fa′ P ZZ A U U I A U U AMAE | 2963 |
| Trichorovin_TV_Ia | * Ac U N V Lx U P Lx Lx U P V OH | 2964 |
| Trichorovin_TV_Ib | * Ac U N V V U P Lx Lx U P Lx OH | 2965 |
| Trichorovin_TV_IIa | * Ac U N V V U P Lx Lx U P Lx OH | 2966 |
| Trichorovin_TV_IIb | * Ac U N Lx V U P Lx Lx U P V OH | 2967 |
| Trichorovin_TV_IIIa | * Ac U Q V V U P Lx Lx U P Lx OH | 2968 |
| Trichorovin_TV_IIIb | * Ac U Q V Lx U P Lx Lx U P V OH | 2969 |
| Trichorovin_TV_IVa | * Ac U Q V V U P Lx Lx U P Lx OH | 2970 |
| Trichorovin_TV_IVb | * Ac U Q Lx V U P Lx Lx U P V OH | 2971 |
| Trichorovin_TV_IVc | * Ac U N V Lx U P Lx Lx U P Lx OH | 2972 |
| Trichorovin_TV_IXa | * Ac U Q V Lx U P Lx Lx U P Lx OH | 2973 |
| Trichorovin_TV_IXb | * Ac U Q Lx Lx U P Lx Lx U P V OH | 2974 |
| Trichorovin_TV_Va | * Ac U N V Lx U P Lx Lx U P Lx OH | 2975 |
| Trichorovin_TV_Vb | * Ac U N Lx Lx U P Lx Lx U P V OH | 2976 |
| Trichorovin_TV_VIa | * Ac U N V Lx U P Lx Lx U P Lx OH | 2977 |
| Trichorovin_TV_VIb | * Ac U N Lx Lx U P Lx Lx U P V OH | 2978 |
| Trichorovin_TV_VIIa | * Ac U N Lx V U P Lx Lx U P Lx OH | 2979 |
| Trichorovin_TV_VIIb | * Ac U Q V Lx U P Lx Lx U P V OH | 2980 |
| Trichorovin_TV_VIII | * Ac U Q V Lx U P Lx Lx U P Lx OH | 2981 |
| Trichorovin_TV_Xa | * Ac U Q Lx V U P Lx Lx U P Lx OH | 2982 |
| Trichorovin_TV_Xb | * Ac U N Lx Lx U P Lx Lx U P Lx OH | 2983 |
| Trichorovin_TV_XIIa | * Ac U N I I U P L L U P I OH | 2984 |
| Trichorovin_TV_XIIb | * Ac U N Lx Lx U P Lx Lx U P L OH | 2985 |
| Trichorovin_TV_XIII | * Ac U Q Lx Lx U P Lx Lx U P Lx OH | 2986 |
| Trichorovin_TV_XIV | * Ac U Q Lx Lx U P Lx Lx U P Lx OH | 2987 |
| Trichorozin_I | * Ac U N I L U P I L U P V OH | 2988 |
| Trichorozin_II | * Ac U Q I L U P I L U P V OH | 2989 |
| Trichorozin_III | * Ac U N I L U P I L U P L OH | 2990 |
| Trichorozin_IV | * Ac U Q I L U P I L U P L OH | 2991 |
| Trichorzianine_TA_IIIc | * Ac U A A U U Q U U U S L U P V U I Q Q W | 2992 |
| | OH | |
| Trichorzianine_TB_IIa | * Ac U A A U U Q U U U S L U P L U I Q E W | 2993 |
| | OH | |
| Trichorzianine_TB_IIIc | * Ac U A A U U Q U U U S L U P V U I Q E W | 2994 |
| | OH | |
| Trichorzianine_TB_IVb | * Ac U A A U J Q U U U S L U P V U I Q E W | 2995 |
| | OH | |
| Trichorzianine_TB_Vb | * Ac U A A U U Q U U U S L U P L U I Q E F OH | 2996 |
| Trichorzianine_TB_VIa | * Ac U A A U J Q U U U S L U P L U I Q E F OH | 2997 |
| Trichorzianine_TB_VIb | * Ac U A A U U Q U U U S L U P V U I Q E F | 2998 |
| | OH | |
| Trichorzianine_TB_VII | * Ac U A A U J Q U U U S L U P V U I Q E F OH | 2999 |
| Trichorzin_HA_I | * Ac U G A U U Q U V U G L U P L U U Q L OH | 3000 |
| Trichorzin_HA_II | * Ac U G A U U Q U V U G L U P L U J Q L OH | 3001 |
| Trichorzin_HA_III | * Ac U G A U J Q U V U G L U P L U U Q L OH | 3002 |
| Trichorzin_HA_V | * Ac U G A U J Q U V U G L U P L U J Q L OH | 3003 |
| Trichorzin_HA_VI | * Ac U G A U J Q J V U G L U P L U J Q L OH | 3004 |
| Trichorzin_HA_VII | * Ac U G A U J Q V V U G L U P L U J Q L OH | 3005 |
| Trichorzin_MA_I | * Ac U S A U U Q U L U G L U P L U U Q V OH | 3006 |
| Trichorzin_MA_II | * Ac U S A U J Q U L U G L U P L U U Q V OH | 3007 |
| Trichorzin_MA_III | * Ac U S A U J Q J L U G L U P L U U Q V OH | 3008 |
| Trichorzin_PA_II | * Ac U S A U J Q U V U G L U P L U U Q W OH | 3009 |
| Trichorzin_PA_IV | * Ac U S A U J Q J V U G L U P L U U Q W OH | 3010 |
| Trichorzin_PA_V | * Ac U S A J J Q U V U G L U P L U U Q W OH | 3011 |
| Trichorzin_PA_VI | * Ac U S A U J Q U V U G L U P L U U Q F OH | 3012 |
| Trichorzin_PA_VII | * Ac U S A J J Q U V U G L U P L U U Q W OH | 3013 |
| Trichorzin_PA_VIII | * Ac U S A U J Q J V U G L U P L U U Q F OH | 3014 |
| Trichorzin_PA_IX | * Ac U S A J J Q U V U G L U P L U U Q F OH | 3015 |
| Trichorzin_PAU4 | * Ac U S A U U Q U V U G L U P L U U Q W OH | 3016 |
| Trichosporin_TS-B- | * Ac U A G U A U Q U Lx A A Vx A P V U Vx Q | 3017 |
| 1a-1 | Q F OH | |
| Trichosporin_TS-B- | * Ac U A G A U U Q U Lx A A Vx A P V U Vx Q | 3018 |
| 1a-2 | Q F OH | |
| Trichosporin_TS-B- | * Ac U A G A U U Q U Lx U G Lx A P V U A Q | 3019 |
| 1b | Q F OH | |
| Trichosporin_TS-B- | * Ac U A S A U U Q U Lx U G Lx A P V U U Q Q | 3020 |
| 1d | F OH | |
| Trichosporin_TS-B- | * Ac U A G A U U Q U Lx U G Lx U P V U U Q | 3021 |
| 1e | Q F OH | |
| Trichosporin_TS-B-1f | * Ac U A S A U U Q U Lx U G Lx U P V U U Q Q | 3022 |
| | F OH | |
| Trichosporin_TS-B- | * Ac U A G A U U Q U Lx U G Lx A P V U U Q | 3023 |
| 1g | Q F OH | |
| Trichosporin_TS-B- | * Ac U A G A U U Q U Lx U G Lx U P V U Vx Q | 3024 |
| 1h | Q F OH | |
| Trichosporin_TS-B-Ia | * Ac U A S A U U Q U L U G L U P V U U Q Q F | 3025 |
| | OH | |
| Trichosporin_TS-B- | * Ac U A A A U U Q U L U G L U P V U U Q Q F | 3026 |
| IIIa | OH | |
| Trichosporin_TS-B- | * Ac U A A A U U Q U I U G L U P V U A Q Q F | 3027 |
| IIIb | OH | |
| Trichosporin_TS-B- | * Ac U A A A A U Q U I U G L U P V U U Q Q F | 3028 |
| IIIc | OH | |
| Trichosporin_TS-B- | * Ac U A A A U U Q U V U G L U P V U U Q Q F | 3029 |
| IIId | OH | |
| Trichosporin_TS-B- | * Ac U A A A U U Q U L U G L U P V U J Q Q F | 3030 |
| IVb | OH | |
| Trichosporin_TS-B- | * Ac U A U A U U Q U V U G L U P V U U Q Q F | 3031 |
| IVc | OH | |
| Trichosporin_TS-B- | * Ac U A A A U U Q U V U G L U P V U J Q Q F | 3032 |
| IVd | OH | |
| Trichosporin_TS-B-V | * Ac U A A A U U Q U I U G L U P V U U Q Q F | 3033 |
| | OH | |
| Trichosporin_TS-B- | * Ac U A U A U U Q U I U G L U P V U U Q Q F | 3034 |
| VIa | OH | |
| Trichosporin_TS-B- | * Ac U A A A U U Q U I U G L U P V U J Q Q F | 3035 |
| VIb | OH | |
| Trichotoxin_A-40 | * Ac U G U L U E U U U A U U P L U J Q V OH | 3036 |
| Trichotoxin_A-40_I | * Ac U G U L U Q U U A A U U P L U U E V OH | 3037 |
| Trichotoxin_A-40_II | * Ac U G U L U Q U U U A A U P L U U E V OH | 3038 |
| Trichotoxin_A-40_III | * Ac U G U L U Q U U A A U U P L U J E V OH | 3039 |
| Trichotoxin_A-40_IV | * Ac U G U L U Q U U U A U U P L U U E V OH | 3040 |
| Trichotoxin_A-40_V | * Ac U G U L U Q U U U A U U P L U J E V OH | 3041 |
| Trichotoxin_A-40_Va | * Ac U A U L U Q U U U A U U P L U U E V OH | 3042 |
| Trichotoxin_A-50_E | * Ac U G U L U Q U U U A A U P L U U Q V OH | 3043 |
| Trichotoxin_A-50_F | * Ac U G U L U Q U U A A A U P L U J Q V OH | 3044 |
| Trichotoxin_A-50_G | * Ac U G U L U Q U U U A A U P L U J Q V OH | 3045 |
| Trichotoxin_A-50_H | * Ac U A U L U Q U U U A A U P L U J Q V OH | 3046 |
| Trichotoxin_A-50_I | * Ac U G U L U Q U U U A U U P L U J Q V OH | 3047 |
| Trichotoxin_A-50_J | * Ac U A U L U Q U U U A U U P L U J Q V OH | 3048 |
| Trichovirin-Ia | * Ac U G A L A Q Vx V U G U U P L U U Q L | 3049 |
| | OH | |
| Trichovirin-Ib | * Ac U G A L U Q A V U G J U P L U U Q L OH | 3050 |
| Trichovirin-IIa | * Ac U G A L A Q U V U G J U P L U U Q L OH | 3051 |
| Trichovirin-IIb | * Ac U G A L U Q U V U G U U P L U U Q L OH | 3052 |
| Trichovirin-IIc | * Ac U G A L U Q Vx V U G U U P L U U Q L | 3053 |
| | OH | |
| Trichovirin-IIIa | * Ac U G A L U Q J V U G U U P L U U Q L OH | 3054 |
| Trichovirin-IIIb | * Ac U G A L J Q J U U G U U P L U U Q L OH | 3055 |
| Trichovirin-IVa | * Ac U G A L J Q J V U G U U P L U U Q L OH | 3056 |
| Trichovirin-IVb | * Ac U G A L U Q U V U G J U P L U U Q L OH | 3057 |
| Trichovirin-V | * Ac U G A L U Q J V U G J U P L U U Q L OH | 3058 |
| Trichovirin-VIa | * Ac U G A L U Q J L U G J U P L U U Q L OH | 3059 |
| Trichovirin-VIb | * Ac U G A L J Q J V U G J U P L U U Q L OH | 3060 |
| Trikoningin_KA_V | * Ac U G A U I Q U U U S L U P V U I Q Q L OH | 3061 |
| Trikoningin_KB_I | * Oc U G V U G G V U G I L OH | 3062 |
| Trikoningin_KB_II | * Oc J G V U G G V U G I L OH | 3063 |
| Tylopeptin_A | * Ac W V U J A Q A U S U A L U Q L OH | 3064 |
| Tylopeptin_B | * Ac W V U U A Q A U S U A L U Q L OH | 3065 |
| XR586 | * Ac W J Q U I T U L U P Q U O J P F G OH | 3066 |
| Zervamicin_A-1-16 | * Boc W I A U I V U L U P A U P U P F OCH3 | 3067 |
| Zervamicin_ZIA | * Ac W I E J V T U L U O Q U O U P F OH | 3068 |
| Zervamicin_ZIB | * Ac W V E J I T U L U O Q U O U P F OH | 3069 |
| Zervamicin_ZIB′ | * Ac W I E U I T U L U O Q U O U P F OH | 3070 |
| Zervamicin_ZIC | * Ac W I E J I T U L U O Q U O U P F OH | 3071 |
| Zervamicin_ZII-1 | * Ac W I Q U V T U L U O Q U O U P F OH | 3072 |
| Zervamicin_ZII-2 | * Ac W I Q U I T U V U O Q U O U P F OH | 3073 |
| Zervamicin_ZII-3 | * Ac W V Q U I T U L U O Q U O U P F OH | 3074 |
| Zervamicin_ZII-4 | * Ac W I Q J V T U L U O Q U O U P F OH | 3075 |
| Zervamicin_ZII-5 | * Ac W I Q J I T U V U O Q U O U P F OH | 3076 |
| Zervamicin_ZIIA | * Ac W I Q U I T U L U O Q U O U P F OH | 3077 |
| Zervamicin_ZIIB | * Ac W I Q J I T U L U O Q U O U P F OH | 3078 |
| CAMEL135 | GWRLIKKILRVFKGL | 3079 |
| (CAM135) | | |
| Novispirin G2 | KNLRIIRKGIHIIKKY* | 3080 |
| B-33 | FKKFWKWFRRF | 3081 |
| B-34 | LKRFLKWFKRF | 3082 |
| B-35 | KLFKRWKHLFR | 3083 |
| B-36 | RLLKRFKHLFK | 3084 |
| B-37 | FKTFLKWLHRF | 3085 |
| B-38 | IKQLLHFFQRF | 3086 |
| B-39 | KLLQTFKQIFR | 3087 |
| B-40 | RILKELKNLFK | 3088 |
| B-41 | LKQFVHFIHRF | 3089 |
| B-42 | VKTLLHIFQRF | 3090 |
| B-43 | KLVEQLKEIFR | 3091 |
| B-44 | RVLQEIKQILK | 3092 |
| B-45 | VKNLAELVHRF | 3093 |
| B-46 | ATHLLHALQRF | 3094 |
| B-47 | KLAENVKEILR | 3095 |
| B-48 | RALHEAKEALK | 3096 |
| B-49 | FHYFWHWFHRF | 3097 |
| B-50 | LYHFLHWFQRF | 3098 |
| B-51 | YLFQTWQHLFR | 3099 |
| B-52 | YLLTEFQHLFK | 3100 |
| B-53 | FKTFLQWLHRF | 3101 |
| B-54 | IKTLLHFFQRF | 3102 |
| B-55 | KLLQTFNQIFR | 3103 |
| B-56 | TILQSLKNIFK | 3104 |
| B-57 | LKQFVKFIHRF | 3105 |
| B-58 | VKQLLKIFNRF | 3106 |
| B-59 | KLVQQLKNIFR | 3107 |
| B-60 | RVLNQVKQILK | 3108 |
| B-61 | VKKLAKLVRRF | 3109 |
| B-62 | AKRLLKVLKRF | 3110 |
| B-63 | KLAQKVKRVLR | 3111 |
| B-64 | RALKRIKHVLK | 3112 |
| 1C-1 | RRRRWWW | 3113 |
| 1C-2 | RRWWRRW | 3114 |
| 1C-3 | RRRWWWR | 3115 |
| 1C-4 | RWRWRWR | 3116 |
| 2C-1 | RRRFWWR | 3117 |
| 2C-2 | RRWWRRF* | 3118 |
| 2C-3 | RRRWWWF* | 3119 |
| 2C-4 | RWRWRWF* | 3120 |
| 3C-1 | RRRRWWK | 3121 |
| 3C-2 | RRWWRRK | 3122 |
| 3C-3 | RRRWWWK | 3123 |
| 3C-4 | RWRWRWK | 3124 |
| 4C-1 | RRRKWWK | 3125 |
| 4C-2 | RRWKRRK | 3126 |
| 4C-3 | RRRKWWK | 3127 |
| 4C-4 | RWRKRWK | 3128 |
| a-3 | LHLLHQLLHLLHQF* | 3129 |
| a-4 | AQAAHQAAHAAHQF* | 3130 |
| a-5 | KLKKLLKKLKKLLK | 3131 |
| a-6 | LKLLKKLLKLLKKF* | 3132 |
| a-7 | LQLLKQLLKLLKQF* | 3133 |
| a-8 | AQAAKQAAKAAKQF* | 3134 |
| a-9 | RWRRWWRHFHHFFH* | 3135 |
| a-10 | KLKKLLKRWRRWWR | 3136 |
| a-11 | RWRRLLKKLHHLLH* | 3137 |
| a-12 | KLKKLLKHLHHLLH* | 3138 |
| BD-1 | FVF RHK WVW KHR FLF | 3139 |
| BD-2 | VFI HRH VWV HKH VLF | 3140 |
| BD-3 | WR WR AR WR WR LR WR F | 3141 |
| BD-4 | WR IH LR AR LH VK FR F | 3142 |
| BD-5 | LR IH AR FK VH IR LK F | 3143 |
| BD-6 | FH IK FR VH LK VR FH F | 3144 |
| BD-7 | FH VK IH FR LH VK FH F | 3145 |
| BD-8 | LH IH AH FH VH IH LH F | 3146 |
| BD-9 | FK IH FR LK VH IR FK F | 3147 |
| BD-10 | FK AH IR FK LR VK FH F | 3148 |
| BD-11 | LK AK IK FK VK LK IK F | 3149 |
| BD-12 | WIW KHK FL HRH FLF | 3150 |
| BD-13 | VFL HRH VI KHK LVF | 3151 |
| BD-14 | FL HKH VL RHR IVF | 3152 |
| BD-15 | VF KHK IV HRH ILF | 3153 |
| BD-16 | FLF KH LFL HR IFF | 3154 |
| BD-17 | LF KH ILI HR VIF | 3155 |
| BD-18 | FL HKH LF KHK LF | 3156 |
| BD-19 | VF RHR FI HRH VF | 3157 |
| BD-20 | FI HK LV HKH VLF | 3158 |
| BD-21 | VL RH LF RHR IVF | 3159 |
| BD-22 | LV HK LIL RH LLF | 3160 |
| BD-23 | VF KR VLI HK LIF | 3161 |
| BD-24 | IV RK FLF RHK VF | 3162 |
| BD-25 | VL KH VIA HKR LF | 3163 |
| BD-26 | FI RK FLF KH LF | 3164 |
| BD-27 | VI RH VWV RK LF | 3165 |
| BD-28 | FLF RHR F RHR LVF | 3166 |
| BD-29 | LFL HKH A KHK FLF | 3167 |
| BD-30 | F KHK F KHK FIF | 3168 |
| BD-31 | L RHR L RHR LIF | 3169 |
| BD-32 | LIL K FLF K FVF | 3170 |
| BD-33 | VLI R ILV R VIF | 3171 |
| BD-34 | F RHR F RHR F | 3172 |
| BD-35 | L KHK L KHK F | 3173 |
| BD-36 | F K F KHK LIF | 3174 |
| BD-37 | L R L RHR VLF | 3175 |
| BD-38 | F K FLF K FLF | 3176 |
| BD-39 | L R LFL R WLF | 3177 |
| BD-40 | F K FLF KHK F | 3178 |
| BD-41 | L R LFL RHR F | 3179 |
| BD-42 | F K FLF K F | 3180 |
| BD-43 | L R LFL R F | 3181 |
| AA-1 | HHFFHHFHHFFHHF* | 3182 |
| AA-2 | FHFFHHFFHFFHHF* | 3183 |
| AA-3 | KLLK-GAT-FHFFHHFFHFFHHF | 3184 |
| AA-4 | KLLK-FHFFHHFFHFFHHF | 3185 |
| AA-5 | FHFFHHFFHFFHHFKLLK | 3186 |
| RIP | YSPWTNF* | 3187 |
| Lariatin A | c(Gly-Ser-Gln-Leu-Val-Tyr-Arg-Glu)-Trp-Val- | 3188 |
| (anti-mycobacteria) | Gly-His-Ser-Asn-Val-Ile-Lys-Pro | |
| Lariatin B | c(Gly-Ser-Gln-Leu-Val-Tyr-Arg-Glu)-Trp-Val- | 3189 |
| (anti-mycobacteria) | Gly-His-Ser-Asn-Val-Ile-Lys-Gly-Pro-Pro | |

Abreviations:
U - Aminoisobutyric Acid (Aib);
J - Isovaline (Iva);
O - Hydroxyproline (Hyp);
Z - Ethylnorvaline (EtNor);
x or xx means L or I at that position;
Ac - optionally acetylated N-term;
OH, OCH3 - optional C-term;
Alkane long chains are noted in brackets;
*optionally amidated C-terminus. Where protecting groups are shown, the gropus are optional. Conversely any of the peptides shown without protecting groups can, optionally bear one or more protecting groups. Where peptides are shown circularized, linear forms are also contemplated. Conversely, where linear peptides are shown circularlized versions are also contemplated.

[0226] In certain embodiments the antimicrobial peptide consists of or comprises the amino acid sequence of LL-37 (LLGDFFRK SKEKIGKEFKRIVQRIKD FLRNL VPRTES, SEQ ID NO:3190) or a variant of LL-37. LL-37 is a cathelicidin anti-microbial corresponding to amino acids 134-170 of the human cationic antimicrobial protein 18 (hCAP18). In certain embodiments the antimicrobial peptide consists of or comprises the amino acid sequence of an LL-37 variant as described in U.S. Patent Publication No: 2009/0156499 A1). Illustrative variants comprise or consist of the amino acid sequence having at least 90%, 95%, or 98% sequence identity with the amino acid sequence FKRIVQRIKDFLRX₁ (SEQ ID NO:3191), where Xᵢ is selected from the group consisting of 0, 1, 2, 3, 4, 5, 6, 7, and 8 amino acids. In certain embodiments illustrative variants comprise or consist of the amino acid sequence having at least 90%, 95%, or 98% sequence identity with the amino acid sequence XᵢRLFDKIRQVIRKFX₂ (SEQ ID NO:3192) where Xᵢ is 0, 1, 2, 3, 4, 5, 6, 7, or 8 amino acids and X₂ is 0, 1, 2, 3, 4, 5, 6, 7, 8, 9, 10, 11, 12, 13, 14, 15, or 16 amino acids.

[0227] In certain embodiments the antimicrobial peptide consists of or comprises the amino acid sequence of an LL-37 variant shown in Table 15.

TABLE 15
LL-37 peptide and variants.

| | | SEQ |
|---|---|---|
| ID | Amino acid sequence | ID NO |
| LL-37 | LLGDFFRKSKEKIGKEFKRIVQRIKDFLRN | 3193 |
| | LVPRTES | |
| Cys-LL-37 | CLLGDFFRKSKEKIGKEFKRIVQRIKDFLR | 3194 |
| | NLVPRTES | |
| LL-37(17-32) | FKRIVQRIKDFLRNLV | 3195 |
| Cys-LL-37-Cys | CLLGDFFRKSKEKIGKEFKRIVQRIKDFLR | 3196 |
| | NLVPRTESC | |
| LL-37FK-13 | FKRIVQRIKDFLR | 3197 |
| LL-37FKR | FKRIVQRIKDFLRNLVPRTES | 3198 |
| LL-37GKE | GKEFKRIVQRIKDFLRNLVPR | 3199 |
| LL-37KRI | KRIVQRIKDFLRNLVPRTES | 3200 |
| LL-37LLG | LLGDFFRKSKEKIGKEFKRIV | 3201 |
| LL-37RKS | RKSKEKIGKEFKRIVQRIKDFLRNLVPRTES | 3202 |
| LL-37SKE | SKEKIGKEFKRIVQRIKDFLR | 3203 |
| LL-37-Cys | LLGDFFRKSKEKIGKEFKRIVQRIKDFLRN | 3204 |
| | LVPRTESC | |

[0228] A number of antimicrobial peptides are also disclosed in U.S. Pat. Nos. 7,271,239, 7,223,840, 7,176,276, 6,809,181, 6,699,689, 6,420,116, 6,358,921, 6,316,594, 6,235,973, 6,183,992, 6,143,498, 6,042,848, 6,040,291, 5,936,063, 5,830,993, 5,428,016, 5,424,396, 5,032,574, 4,623,733, which are incorporated herein by reference for the disclosure of particular antimicrobial peptides.

[0229] v. Ligands.

[0230] In certain embodiments the effector can comprise one ore more ligands, epitope tags, and/or antibodies. In certain embodiments preferred ligands and antibodies include those that bind to surface markers on immune cells. Chimeric moieties utilizing such antibodies as effector molecules act as bifunctional linkers establishing an association between the immune cells bearing binding partner for the ligand or antibody and the target microorganism(s).

[0231] The terms “epitope tag” or “affinity tag” are used interchangeably herein, and used refers to a molecule or domain of a molecule that is specifically recognized by an antibody or other binding partner. The term also refers to the binding partner complex as well. Thus, for example, biotin or a biotin/avidin complex are both regarded as an affinity tag. In addition to epitopes recognized in epitope/antibody interactions, affinity tags also comprise “epitopes” recognized by other binding molecules (e.g. ligands bound by receptors), ligands bound by other ligands to form heterodimers or homodimers, His₆ bound by Ni-NTA, biotin bound by avidin, streptavidin, or anti-biotin antibodies, and the like.

[0232] Epitope tags are well known to those of skill in the art. Moreover, antibodies specific to a wide variety of epitope tags are commercially available. These include but are not limited to antibodies against the DYKDDDDK (SEQ ID NO:3205) epitope, c-myc antibodies (available from Sigma, St. Louis), the HNK-1 carbohydrate epitope, the HA epitope, the HSV epitope, the His₄ (SEQ ID NO:3206), His₅ (SEQ ID NO:3207), and His₆ (SEQ ID NO:3208) epitopes that are recognized by the His epitope specific antibodies (see, e.g., Qiagen), and the like. In addition, vectors for epitope tagging proteins are commercially available. Thus, for example, the pCMV-Tag1 vector is an epitope tagging vector designed for gene expression in mammalian cells. A target gene inserted into the pCMV-Tag1 vector can be tagged with the FLAG ® epitope (N-terminal, C-terminal or internal tagging), the c-myc epitope (C-terminal) or both the FLAG (N-terminal) and c-myc (C-terminal) epitopes.

[0233] vi. Lipids and Liposomes.

[0234] In certain embodiments the effectors comprise one or more microparticles or nanoparticles that can be loaded with an effector agent (e.g., a pharmaceutical, a label, etc.). In certain embodiments the microparticles or nanoparticles are lipidic particles. Lipidic particles are microparticles or nanoparticles that include at least one lipid component forming a condensed lipid phase. Typically, a lipidic nanoparticle has preponderance of lipids in its composition. Various condensed lipid phases include solid amorphous or true crystalline phases; isomorphic liquid phases (droplets); and various hydrated mesomorphic oriented lipid phases such as liquid crystalline and pseudocrystalline bilayer phases (L-alpha, L-beta, P-beta, Lc), interdigitated bilayer phases, and nonlamellar phases (see, e.g., The Structure of Biological Membranes, ed. by P. Yeagle, CRC Press, Bora Raton, Fla., 1991). Lipidic microparticles include, but are not limited to a liposome, a lipid-nucleic acid complex, a lipid-drug complex, a lipid-label complex, a solid lipid particle, a microemulsion droplet, and the like. Methods of making and using these types of lipidic microparticles and nanoparticles, as well as attachment of affinity moieties, e.g., antibodies, to them are known in the art (see, e.g., U.S. Pat. Nos. 5,077,057; 5,100,591; 5,616,334; 6,406,713; 5,576,016; 6,248,363; Bondi et al. (2003) Drug Delivery 10: 245-250; Pedersen et al., (2006) Eur. J. Pharm. Biopharm. 62: 155-162, 2006 (solid lipid particles); U.S. Pat. Nos. 5,534,502; 6,720,001; Shiokawa et al. (2005) Clin. Cancer Res. 11: 2018-2025 (microemulsions); U.S. Pat. Nos. 6,071,533 (lipid-nucleic acid complexes), and the like).

[0235] A liposome is generally defined as a particle comprising one or more lipid bilayers enclosing an interior, typically an aqueous interior. Thus, a liposome is often a vesicle formed by a bilayer lipid membrane. There are many methods for the preparation of liposomes. Some of them are used to prepare small vesicles (d<0.05 micrometer), some for larger vesicles (d>0.05 micrometer). Some are used to prepare multilamellar vesicles, some for unilamellar ones. Methods for liposome preparation are exhaustively described in several review articles such as Szoka and Papahadjopoulos (1980) Ann. Rev. Biophys. Bioeng., 9: 467, Deamer and Uster (1983) Pp. 27-51 In: Liposomes, ed. M. J. Ostro, Marcel Dekker, New York, and the like.

[0236] In various embodiments the liposomes include a surface coating of a hydrophilic polymer chain. “Surface-coating” refers to the coating of any hydrophilic polymer on the surface of liposomes. The hydrophilic polymer is included in the liposome by including in the liposome composition one or more vesicle-forming lipids derivatized with a hydrophilic polymer chain. In certain embodiments, vesicle-forming lipids with diacyl chains, such as phospholipids, are preferred. One illustrative phospholipid is phosphatidylethanolamine (PE), which contains a reactive amino group convenient for coupling to the activated polymers. One illustrative PE is distearoyl PE (DSPE). Another example is non-phospholipid double chain amphiphilic lipids, such as diacyl- or dialkylglycerols, derivatized with a hydrophilic polymer chain.

[0237] In certain embodiments a hydrophilic polymer for use in coupling to a vesicle forming lipid is polyethyleneglycol (PEG), preferably as a PEG chain having a molecular weight between 1,000-10,000 Daltons, more preferably between 1,000-5,000 Daltons, most preferably between 2,000-5,000 Daltons. Methoxy or ethoxy-capped analogues of PEG are also useful hydrophilic polymers, commercially available in a variety of polymer sizes, e.g., 120-20,000 Daltons.

[0238] Other hydrophilic polymers that can be suitable include, but are not limited to polylactic acid, polyglycolic acid, polyvinylpyrrolidone, polymethyloxazoline, polyethyloxazoline, polyhydroxypropyl methacrylamide, polymethacrylamide, polydimethylacrylamide, and derivatized celluloses, such as hydroxymethylcellulose or hydroxyethylcellulose.

[0239] Preparation of lipid-polymer conjugates containing these polymers attached to a suitable lipid, such as PE, have been described, for example in U.S. Pat. No. 5,395,

[0240] The liposomes can, optionally be prepared for attachment to one or more targeting moieties described herein. Here the lipid component included in the liposomes would include either a lipid derivatized with the targeting moiety, or a lipid having a polar-head chemical group, e.g., on a linker, that can be derivatized with the targeting moiety in preformed liposomes, according to known methods.

[0241] Methods of functionalizing lipids and liposomes with affinity moieties such as antibodies are well known to those of skill in the art (see, e.g. , DE 3,218,121; Epstein et al. (1985) Proc. Natl. Acad. Sci., USA, 82:3688 (1985); Hwang et al. (1980) Proc. Natl. Acad. Sci., USA, 77: 4030; EP 52,322; EP 36,676; EP 88,046; EP 143,949; EP 142,641; Japanese patent application 83-118008; U.S. Pat. Nos. 4,485,045 and 4,544,545; and EP 102,324, all of which are incorporated herein by reference).

[0242] vii. Agents That Physically Disrupt the Extracellular Matrix Within a Community of Microorganisms

[0243] In certain embodiments, peptides can be coupled to agents that physically disrupt the extracellular matrix within a community of microorganisms, for example a biofilm. In certain preferred embodiments, such an agent could be a bacterial cell-wall degrading enzyme, for example SAL-2, or any species of glycosidase, alginase, peptidase, proteinase, lipase, or DNA or RNA degrading enzyme or compound, for example rhRNase. Disruption of extracellular matrix of biofilms can result in clearance and therapeutic benefit.

[0244] Peptides can also be attached to antimicrobial proteins, such as Protein Inhibitor C or Colicin, or fragments thereof, for example the IIa domain of Colicin, or the heparin-binding domain of Protein Inhibitor C.

[0245] viii. Polymeric microparticles and/or Nanoparticles.

[0246] In certain embodiments the effector(s) comprise polymeric microparticles and/or nanoparticles and/or micelles.

[0247] Microparticle and nanoparticle-based drug delivery systems have considerable potential for treatment of various microorganisms. Technological advantages of polymeric microparticles or nanoparticles used as drug carriers are high stability, high carrier capacity, feasibility of incorporation of both hydrophilic and hydrophobic substances, and feasibility of variable routes of administration, including oral application and inhalation. Polymeric nanoparticles can also be designed to allow controlled (sustained) drug release from the matrix. These properties of nanoparticles enable improvement of drug bioavailability and reduction of the dosing frequency.

[0248] Polymeric nanoparticles are typically micron or submicron (<1 μm) colloidal particles. This definition includes monolithic nanoparticles (nanospheres) in which the drug is adsorbed, dissolved, or dispersed throughout the matrix and nanocapsules in which the drug is confined to an aqueous or oily core surrounded by a shell-like wall. Alternatively, in certain embodiments, the drug can be covalently attached to the surface or into the matrix.

[0249] Polymeric microparticles and nanoparticles are typically made from biocompatible and biodegradable materials such as polymers, either natural (e.g., gelatin, albumin) or synthetic (e.g., polylactides, polyalkylcyanoacrylates), or solid lipids. In the body, the drug loaded in nanoparticles is usually released from the matrix by diffusion, swelling, erosion, or degradation. One commonly used material is poly(lactide-co-glycolide) (PLG).

[0250] Methods of fabricating and loading polymeric nanoparticles or microparticles are well known to those of skill in the art. Thus, for example, Matsumoto et al. (1999) Intl. J. Pharmaceutics, 185: 93-101 teaches the fabrication of poly(L-lactide)-poly(ethylene glycol)-poly(L-lactide) nanoparticles, Chawla et al. (2002) Intl. J. Pharmaceutics 249: 127-138, teaches the fabrication and use of poly(e-caprolactone) nanoparticles delivery of tamifoxen, and Bodmeier et al. (1988) Intl. J. Pharmaceutics, 43: 179-186, teaches the preparation of poly(D,L-lactide) microspheres using a solvent evaporation method. “Intl. J. Pharmaceutics, 1988, 43, 179-186. Other nanoparticle formulations are described, for example, by Williams et al. (2003) J. Controlled Release, 91: 167-172; Leroux et al. (1996) J. Controlled Release, 39: 339-350; Soppimath et al. (2001) J. Controlled Release, 70: 1-20; Brannon-Peppas (1995) Intl. J. Pharmaceutics, 116: 1-9; and the like.

[0251] C) Peptide Preparation.

[0252] The peptides described herein can be chemically synthesized using standard chemical peptide synthesis techniques or, particularly where the peptide does not comprise “D” amino acid residues, the peptide can be recombinantly expressed. Where the “D” polypeptides are recombinantly expressed, a host organism (e.g. bacteria, plant, fungal cells, etc.) can be cultured in an environment where one or more of the amino acids is provided to the organism exclusively in a D form. Recombinantly expressed peptides in such a system then incorporate those D amino acids.

[0253] In certain embodiments, D amino acids can be incorporated in recombinantly expressed peptides using modified amino acyl-tRNA synthetases that recognize D-amino acids.

[0254] In certain embodiments the peptides are chemically synthesized by any of a number of fluid or solid phase peptide synthesis techniques known to those of skill in the art. Solid phase synthesis in which the C-terminal amino acid of the sequence is attached to an insoluble support followed by sequential addition of the remaining amino acids in the sequence is a preferred method for the chemical synthesis of the polypeptides of this invention. Techniques for solid phase synthesis are well known to those of skill in the art and are described, for example, by Barany and Merrifield (1963) Solid-Phase Peptide Synthesis; pp. 3-284 in The Peptides: Analysis, Synthesis, Biology. Vol. 2: Special Methods in Peptide Synthesis, Part A.; Merrifield et al. (1963) J. Am. Chem. Soc., 85: 2149-2156, and Stewart et al. (1984) Solid Phase Peptide Synthesis, 2nd ed. Pierce Chem. Co., Rockford, Ill.

[0255] In one embodiment, the peptides can be synthesized by the solid phase peptide synthesis procedure using a benzhyderylamine resin (Beckman Bioproducts, 0.59 mmol of NH₂/g of resin) as the solid support. The COOH terminal amino acid (e.g., t-butylcarbonyl-Phe) is attached to the solid support through a 4-(oxymethyl)phenacetyl group. This is a more stable linkage than the conventional benzyl ester linkage, yet the finished peptide can still be cleaved by hydrogenation. Transfer hydrogenation using formic acid as the hydrogen donor can be used for this purpose.

[0256] It is noted that in the chemical synthesis of peptides, particularly peptides comprising D amino acids, the synthesis usually produces a number of truncated peptides in addition to the desired full-length product. Thus, the peptides are typically purified using, e.g., HPLC.

[0257] D-amino acids, beta amino acids, non-natural amino acids, and the like can be incorporated at one or more positions in the peptide simply by using the appropriately derivatized amino acid residue in the chemical synthesis. Modified residues for solid phase peptide synthesis are commercially available from a number of suppliers (see, e.g., Advanced Chem Tech, Louisville; Nova Biochem, San Diego; Sigma, St Louis; Bachem California Inc., Torrance, etc.). The D-form and/or otherwise modified amino acids can be completely omitted or incorporated at any position in the peptide as desired. Thus, for example, in certain embodiments, the peptide can comprise a single modified acid, while in other embodiments, the peptide comprises at least two, generally at least three, more generally at least four, most generally at least five, preferably at least six, more preferably at least seven or even all modified amino acids. In certain embodiments, essentially every amino acid is a D-form amino acid.

[0258] As indicated above, the peptides and/or fusion proteins of this invention can also be recombinantly expressed. Accordingly, in certain embodiments, the antimicrobial peptides and/or targeting moieties, and/or fusion proteins of this invention are synthesized using recombinant expression systems. Generally this involves creating a DNA sequence that encodes the desired peptide or fusion protein, placing the DNA in an expression cassette under the control of a particular promoter, expressing the peptide or fusion protein in a host, isolating the expressed peptide or fusion protein and, if required, renaturing the peptide or fusion protein.

[0259] DNA encoding the peptide(s) or fusion protein(s) described herein can be prepared by any suitable method as described above, including, for example, cloning and restriction of appropriate sequences or direct chemical synthesis.

[0260] This nucleic acid can be easily ligated into an appropriate vector containing appropriate expression control sequences (e.g. promoter, enhancer, etc.), and, optionally, containing one or more selectable markers (e.g. antibiotic resistance genes).

[0261] The nucleic acid sequences encoding the peptides or fusion proteins described herein can be expressed in a variety of host cells, including, but not limited to, E. coli, other bacterial hosts, yeast, fungus, and various higher eukaryotic cells such as insect cells (e.g. SF3), the COS, CHO and HeLa cells lines and myeloma cell lines. The recombinant protein gene will typically be operably linked to appropriate expression control sequences for each host. For E. coli this can include a promoter such as the T7, trp, or lambda promoters, a ribosome binding site and preferably a transcription termination signal. For eukaryotic cells, the control sequences can include a promoter and often an enhancer (e.g., an enhancer derived from immunoglobulin genes, SV40, cytomegalovirus, etc.), and a polyadenylation sequence, and may include splice donor and acceptor sequences.

[0262] The plasmids can be transferred into the chosen host cell by well-known methods such as calcium chloride transformation for E. coli and calcium phosphate treatment or electroporation for mammalian cells. Cells transformed by the plasmids can be selected by resistance to antibiotics conferred by genes contained on the plasmids, such as the amp, gpt, neo and hyg genes.

[0263] Once expressed, the recombinant peptide(s) or fusion protein(s) can be purified according to standard procedures of the art, including ammonium sulfate precipitation, affinity columns, column chromatography, gel electrophoresis and the like (see, generally, R. Scopes, (1982) Protein Purification, Springer-Verlag, N.Y.; Deutscher (1990) Methods in Enzymology Vol. 182: Guide to Protein Purification, Academic Press, Inc. N.Y.). Substantially pure compositions of at least about 90 to 95% homogeneity are preferred, and 98 to 99% or more homogeneity are most preferred.

[0264] One of skill in the art would recognize that after chemical synthesis, biological expression, or purification, the peptide(s) or fusion protein(s) may possess a conformation substantially different than desired native conformation. In this case, it may be necessary to denature and reduce the peptide or fusion protein and then to cause the molecule to re-fold into the preferred conformation. Methods of reducing and denaturing proteins and inducing re-folding are well known to those of skill in the art (see, e.g., Debinski et al. (1993) J. Biol. Chem., 268: 14065-14070; Kreitman and Pastan (1993) Bioconjug. Chem., 4: 581-585; and Buchner, et al., (1992) Anal. Biochem., 205: 263-270). Debinski et al., for example, describes the denaturation and reduction of inclusion body proteins in guanidine-DTE. The protein is then refolded in a redox buffer containing oxidized glutathione and L-arginine.

[0265] One of skill would recognize that modifications can be made to the peptide(s) and/or fusion protein(s) proteins without diminishing their biological activity. Some modifications may be made to facilitate the cloning, expression, or incorporation of the targeting molecule into a fusion protein. Such modifications are well known to those of skill in the art and include, for example, a methionine added at the amino terminus to provide an initiation site, or additional amino acids (e.g., poly His) placed on either terminus to create conveniently located restriction sites or termination codons or purification sequences.

[0266] D) Joining Targeting Moieties to Effectors.

[0267] i. Chemical Conjugation.

[0268] Chimeric moieties are formed by joining one or more of the targeting moieties described herein to one or more effectors. In certain embodiments the targeting moieties are attached directly to the effector(s) via naturally occurring reactive groups or the targeting moiety and/or the effector(s) can be functionalized to provide such reactive groups.

[0269] In various embodiments the targeting moieties are attached to effector(s) via one or more linking agents. Thus, in various embodiments the targeting moieties and the effector(s) can be conjugated via a single linking agent or multiple linking agents. For example, the targeting moiety and the effector can be conjugated via a single multifunctional (e.g., bi-, tri-, or tetra-) linking agent or a pair of complementary linking agents. In another embodiment, the targeting moiety and the effector are conjugated via two, three, or more linking agents. Suitable linking agents include, but are not limited to, e.g., functional groups, affinity agents, stabilizing groups, and combinations thereof.

[0270] In certain embodiments the linking agent is or comprises a functional group. Functional groups include monofunctional linkers comprising a reactive group as well as multifunctional crosslinkers comprising two or more reactive groups capable of forming a bond with two or more different functional targets (e.g., labels, proteins, macromolecules, semiconductor nanocrystals, or substrate). In some preferred embodiments, the multifunctional crosslinkers are heterobifunctional crosslinkers comprising two or more different reactive groups.

[0271] Suitable reactive groups include, but are not limited to thiol (-SH), carboxylate (COOH), carboxyl (—COOH), carbonyl, amine (NH₂), hydroxyl (—OH), aldehyde (—CHO), alcohol (ROH), ketone (R₂CO), active hydrogen, ester, sulfhydryl (SH), phosphate (—PO₃), or photoreactive moieties. Amine reactive groups include, but are not limited to e.g., isothiocyanates, isocyanates, acyl azides, NHS esters, sulfonyl chlorides, aldehydes and glyoxals, epoxides and oxiranes, carbonates, arylating agents, imidoesters, carbodiimides, and anhydrides. Thiol-reactive groups include, but are not limited to e.g., haloacetyl and alkyl halide derivates, maleimides, aziridines, acryloyl derivatives, arylating agents, and thiol-disulfides exchange reagents. Carboxylate reactive groups include, but are not limited to e.g., diazoalkanes and diazoacetyl compounds, such as carbonyldiimidazoles and carbodiimides. Hydroxyl reactive groups include, but are not limited to e.g., epoxides and oxiranes, carbonyldiimidazole, oxidation with periodate, N,N′-disuccinimidyl carbonate or N-hydroxylsuccimidyl chloroformate, enzymatic oxidation, alkyl halogens, and isocyanates. Aldehyde and ketone reactive groups include, but are not limited to e.g., hydrazine derivatives for schiff base formation or reduction amination. Active hydrogen reactive groups include, but are not limited to e.g., diazonium derivatives for mannich condensation and iodination reactions. Photoreactive groups include, but are not limited to e.g., aryl azides and halogenated aryl azides, benzophenones, diazo compounds, and diazirine derivatives.

[0272] Other suitable reactive groups and classes of reactions useful in forming chimeric moieties include those that are well known in the art of bioconjugate chemistry. Currently favored classes of reactions available with reactive chelates are those which proceed under relatively mild conditions. These include, but are not limited to, nucleophilic substitutions (e.g., reactions of amines and alcohols with acyl halides, active esters), electrophilic substitutions (e.g., enamine reactions), and additions to carbon-carbon and carbon-heteroatom multiple bonds (e.g., Michael reaction, Diels-Alder addition). These and other useful reactions are discussed in, for example, March (1985) Advanced Organic Chemistry, 3rd Ed., John Wiley & Sons, New York, Hermanson (1996) Bioconjugate Techniques, Academic Press, San Diego; and Feeney et al. (1982) Modification of Proteins; Advances in Chemistry Series, Vol. 198, American Chemical Society, Washington, D.C.

[0273] In certain embodiments, the linking agent comprises a chelator. For example, the chelator comprising the molecule, DOTA (DOTA=1,4,7,10-tetrakis(carboxymethyl)-1,4,7,10-tetraazacyclododecane), can readily be labeled with a radiolabel, such as Gd³⁺ and ⁶⁴Cu, resulting in Gd³⁺-DOTA and ⁶⁴Cu-DOTA respectively, attached to the targeting moiety. Other suitable chelates are known to those of skill in the art, for example, 1,4,7-triazacyclononane-N,N′,N″-triacetic acid (NOTA) derivatives being among the most well known (see, e.g., Lee et al. (1997) Nucl Med Biol. 24: 2225-23019).

[0274] A “linker” or “linking agent” as used herein, is a molecule that is used to join two or more molecules. In certain embodiments the linker is typically capable of forming covalent bonds to both molecule(s) (e.g., the targeting moiety and the effector). Suitable linkers are well known to those of skill in the art and include, but are not limited to, straight or branched-chain carbon linkers, heterocyclic carbon linkers, or peptide linkers. In certain embodiments the linkers can be joined to the constituent amino acids through their side groups (e.g., through a disulfide linkage to cysteine). However, in certain embodiments, the linkers will be joined to the alpha carbon amino and carboxyl groups of the terminal amino acids.

[0275] A bifunctional linker having one functional group reactive with a group on one molecule (e.g., a targeting peptide), and another group reactive on the other molecule (e.g., an antimicrobial peptide), can be used to form the desired conjugate. Alternatively, derivatization can be performed to provide functional groups. Thus, for example, procedures for the generation of free sulfhydryl groups on peptides are also known (See U.S. Pat. No. 4,659,839).

[0276] In certain embodiments the linking agent is a heterobifunctional crosslinker comprising two or more different reactive groups that form a heterocyclic ring that can interact with a peptide. For example, a heterobifunctional crosslinker such as cysteine may comprise an amine reactive group and a thiol-reactive group can interact with an aldehyde on a derivatized peptide. Additional combinations of reactive groups suitable for heterobifunctional crosslinkers include, for example, amine- and sulfhydryl reactive groups; carbonyl and sulfhydryl reactive groups; amine and photoreactive groups; sulfhydryl and photoreactive groups; carbonyl and photoreactive groups; carboxylate and photoreactive groups; and arginine and photoreactive groups. In one embodiment, the heterobifunctional crosslinker is SMCC.

[0277] Many procedures and linker molecules for attachment of various molecules to peptides or proteins are known (see, e.g., European Patent Application No. 188,256; U.S. Pat. Nos. 4,671,958, 4,659,839, 4,414,148, 4,699,784; 4,680,338; 4,569,789; and 4,589,071; and Borlinghaus et al. (1987) Cancer Res. 47: 4071-4075). Illustrative linking protocols are provided herein in Examples 2 and 3.

[0278] ii. Fusion Proteins.

[0279] In certain embodiments where the targeting moiety and effector are both peptides or both comprise peptides, the chimeric moiety can be chemically synthesized or recombinantly expressed as a fusion protein (i.e., a chimeric fusion protein).

[0280] In certain embodiments the chimeric fusion proteins are synthesized using recombinant DNA methodology. Generally this involves creating a DNA sequence that encodes the fusion protein, placing the DNA in an expression cassette under the control of a particular promoter, expressing the protein in a host, isolating the expressed protein and, if required, renaturing the protein.

[0281] DNA encoding the fusion proteins can be prepared by any suitable method, including, for example, cloning and restriction of appropriate sequences or direct chemical synthesis by methods such as the phosphotriester method of Narang et al. (1979) Meth. Enzymol. 68: 90-99; the phosphodiester method of Brown et al. (1979) Meth. Enzymol. 68: 109-151; the diethylphosphoramidite method of Beaucage et al. (1981) Tetra. Lett., 22: 1859-1862; and the solid support method of U.S. Pat. No. 4,458,066.

[0282] Chemical synthesis produces a single stranded oligonucleotide. This can be converted into double stranded DNA by hybridization with a complementary sequence or by polymerization with a DNA polymerase using the single strand as a template. One of skill would recognize that while chemical synthesis of DNA is limited to sequences of about 100 bases, longer sequences can be obtained by the ligation of shorter sequences.

[0283] Alternatively, subsequences can be cloned and the appropriate subsequences cleaved using appropriate restriction enzymes. The fragments can then be ligated to produce the desired DNA sequence.

[0284] In certain embodiments, DNA encoding fusion proteins of the present invention may be cloned using DNA amplification methods such as polymerase chain reaction (PCR). Thus, for example, the nucleic acid encoding a targeting antibody, a targeting peptide, and the like is PCR amplified, using a sense primer containing the restriction site for NdeI and an antisense primer containing the restriction site for HindIII. This produces a nucleic acid encoding the targeting sequence and having terminal restriction sites. Similarly an effector and/or effector/linker/spacer can be provided having complementary restriction sites. Ligation of sequences and insertion into a vector produces a vector encoding the fusion protein.

[0285] While the targeting moieties and effector(s) can be directly joined together, one of skill will appreciate that they can be separated by a peptide spacer/linker consisting of one or more amino acids. Generally the spacer will have no specific biological activity other than to join the proteins or to preserve some minimum distance or other spatial relationship between them. However, the constituent amino acids of the spacer may be selected to influence some property of the molecule such as the folding, net charge, or hydrophobicity.

[0286] The nucleic acid sequences encoding the fusion proteins can be expressed in a variety of host cells, including E. coli, other bacterial hosts, yeast, and various higher eukaryotic cells such as the COS, CHO and HeLa cells lines and myeloma cell lines. The recombinant protein gene will be operably linked to appropriate expression control sequences for each host. For E. coli this includes a promoter such as the T7, tip, or lambda promoters, a ribosome binding site and preferably a transcription termination signal. For eukaryotic cells, the control sequences will include a promoter and preferably an enhancer derived from immunoglobulin genes, SV40, cytomegalovirus, etc., and a polyadenylation sequence, and may include splice donor and acceptor sequences.

[0287] The plasmids can be transferred into the chosen host cell by well-known methods such as calcium chloride transformation for E. coli and calcium phosphate treatment or electroporation for mammalian cells. Cells transformed by the plasmids can be selected by resistance to antibiotics conferred by genes contained on the plasmids, such as the amp, gpt, neo and hyg genes.

[0288] Once expressed, the recombinant fusion proteins can be purified according to standard procedures of the art, including ammonium sulfate precipitation, affinity columns, column chromatography, gel electrophoresis and the like (see, generally, R. Scopes (1982) Protein Purification, Springer-Verlag, N.Y.; Deutscher (1990) Methods in Enzymology Vol. 182: Guide to Protein Purification, Academic Press, Inc. N.Y.). Substantially pure compositions of at least about 90 to 95% homogeneity are preferred, and 98 to 99% or more homogeneity are most preferred for pharmaceutical uses. Once purified, partially or to homogeneity as desired, the polypeptides may then be used therapeutically.

[0289] One of skill in the art would recognize that after chemical synthesis, biological expression, or purification, the fusion protein may possess a conformation substantially different than the native conformations of the constituent polypeptides. In this case, it may be necessary to denature and reduce the polypeptide and then to cause the polypeptide to re-fold into the preferred conformation. Methods of reducing and denaturing proteins and inducing re-folding are well known to those of skill in the art (See, Debinski et al. (1993) J. Biol. Chem., 268: 14065-14070; Kreitman and Pastan (1993) Bioconjug. Chem., 4: 581-585; and Buchner, et al. (1992) Anal. Biochem., 205: 263-270).

[0290] One of skill would recognize that modifications can be made to the fusion proteins without diminishing their biological activity. Some modifications may be made to facilitate the cloning, expression, or incorporation of the targeting molecule into a fusion protein. Such modifications are well known to those of skill in the art and include, for example, a methionine added at the amino terminus to provide an initiation site, or additional amino acids placed on either terminus to create conveniently located restriction sites or termination codons.

[0291] As indicated above, in various embodiments a peptide linker/spacer is used to join the one or more targeting moieties to one or more effector(s). In various embodiments the peptide linker is relatively short, typically less than about 10 amino acids, preferably less than about 8 amino acids and more preferably about 3 to about 5 amino acids. Suitable illustrative linkers include, but are not limited to PSGSP ((SEQ ID NO:3209), ASASA (SEQ ID NO: 3210), or GGG. In certain embodiments longer linkers such as (GGGGS)₃ (SEQ ID NO:3211) can be used. Illustrative peptide linkers and other linkers are shown in Table 16.

TABLE 16
Illustrative peptide and non-peptide linkers.

| Linker | SEQ ID NO: |
|---|---|
| AAA | |
| GGG | |
| GGGG | 3212 |
| SGG | |
| GGSGGS | 3213 |
| SAT | |
| PYP | |
| PSPSP | 3214 |
| ASA | |
| ASASA | 3215 |
| PSPSP | 3216 |
| KKKK | 3217 |
| RRRR | 3218 |
| GGGGS | 3219 |
| GGGGS GGGGS | 3220 |
| GGGGS GGGGS GGGGS | 3221 |
| GGGGS GGGGS GGGGS GGGGS | 3222 |
| GGGGS GGGGS GGGGS GGGGS GGGGS | 3223 |
| GGGGS GGGGS GGGGS GGGGS GGGGS GGGGS | 3224 |
| 2-nitrobenzene or O-nitrobenzyl | |
| Nitropyridyl disulfide | |
| Dioleoylphosphatidylethanolamine (DOPE) | |
| S-acetylmercaptosuccinic acid | |
| 1,4,7,10-tetraazacyclododecane-1,4,7,10-tetracetic acid (DOTA) | |
| β-glucuronide and β-glucuronide variants | |
| Poly(alkylacrylic acid) | |
| Benzene-based linkers (for example: 2,5-Bis(hexyloxy)-1,4-bis[2,5- | |
| bis(hexyloxy)-4-formyl-phenylenevinylene]benzene) and like | |
| molecules | |
| Disulfide linkages | |
| Poly(amidoamine) or like dendrimers linking multiple target and killing | |
| peptides in one molecule | |
| Carbon nanotubes | |
| Hydrazone and hydrazone variant linkers | |
| PEG of any chain length | |
| Succinate, formate, acetate butyrate, other like organic acids | |
| Aldols, alcohols, or enols | |
| Peroxides | |
| alkane or alkene groups of any chain length | |
| One or more porphyrin or dye molecules containing free amide and | |
| carboxylic acid groups | |
| One or more DNA or RNA nucleotides, including polyamine and | |
| polycarboxyl-containing variants | |
| Inulin, sucrose, glucose, or other single, di or polysaccharides | |
| Linoleic acid or other polyunsaturated fatty acids | |
| Variants of any of the above linkers containing halogen or thiol | |
| groups | |

(All amino-acid-based linkers could be L, D, combinations of L and D forms, β-form, and the like)

[0292] E) Multiple Targeting Moieties and/or Effectors.

[0293] As indicated above, in certain embodiments, the chimeric moieties described herein comprise multiple targeting moieties attached to a single effector or multiple effectors attached to a single targeting moiety, or multiple targeting moieties attached to multiple effectors.

[0294] Where the chimeric construct is a fusion protein this is easily accomplished by providing multiple domains that are targeting domains attached to one or more effector domains. FIG. 14 schematically illustrates a few, but not all, configurations. In various embodiments the multiple targeting domains and/or multiple effector domains can be attached to each other directly or can be separated by linkers (e.g., amino acid or peptide linkers as described above).

[0295] When the chimeric construct is a chemical conjugate linear or branched configurations (e.g., as illustrated in FIG. 14) are readily produced by using branched or multifunctional linkers and/or a plurality of different linkers.

[0296] F) Protecting Groups.

[0297] While the various peptides (e.g., targeting peptides, antimicrobial peptides, STAMPs) described herein may be shown with no protecting groups, in certain embodiments they can bear one, two, three, four, or more protecting groups. In various embodiments, the protecting groups can be coupled to the C- and/or N-terminus of the peptide(s) and/or to one or more internal residues comprising the peptide(s) (e.g., one or more R-groups on the constituent amino acids can be blocked). Thus, for example, in certain embodiments, any of the peptides described herein can bear, e.g., an acetyl group protecting the amino terminus and/or an amide group protecting the carboxyl terminus. One example of such a protected peptide is the 1845L6-21 STAMP having the amino acid sequence KFINGVLSQFVLERKPYPKLFKFLRKHLL* (SEQ ID NO:3225), where the asterisk indicates an amidated carboxyl terminus. Of course, this protecting group can be can be eliminated and/or substituted with another protecting group as described herein.

[0298] Without being bound by a particular theory, it was discovered that addition of a protecting group, particularly to the carboxyl and in certain embodiments the amino terminus can improve the stability and efficacy of the peptide.

[0299] A wide number of protecting groups are suitable for this purpose. Such groups include, but are not limited to acetyl, amide, and alkyl groups with acetyl and alkyl groups being particularly preferred for N-terminal protection and amide groups being preferred for carboxyl terminal protection. In certain particularly preferred embodiments, the protecting groups include, but are not limited to alkyl chains as in fatty acids, propionyl, formyl, and others. Particularly preferred carboxyl protecting groups include amides, esters, and ether-forming protecting groups. In one preferred embodiment, an acetyl group is used to protect the amino terminus and an amide group is used to protect the carboxyl terminus. These blocking groups enhance the helix-forming tendencies of the peptides. Certain particularly preferred blocking groups include alkyl groups of various lengths, e.g., groups having the formula: CH₃—(CH₂)ₙ—CO— where n ranges from about 1 to about 20, preferably from about 1 to about 16 or 18, more preferably from about 3 to about 13, and most preferably from about 3 to about 10.

[0300] In certain embodiments, the protecting groups include, but are not limited to alkyl chains as in fatty acids, propionyl, formyl, and others. Particularly preferred carboxyl protecting groups include amides, esters, and ether-forming protecting groups. In one embodiment, an acetyl group is used to protect the amino terminus and/or an amino group is used to protect the carboxyl terminus (i.e., amidated carboxyl terminus). In certain embodiments blocking groups include alkyl groups of various lengths, e.g., groups having the formula: CH₃—(CH₂)ₙ—CO— where n ranges from about 3 to about 20, preferably from about 3 to about 16, more preferably from about 3 to about 13, and most preferably from about 3 to about 10.

[0301] In certain embodiments, the acid group on the C-terminal can be blocked with an alcohol, aldehyde or ketone group and/or the N-terminal residue can have the natural amide group, or be blocked with an acyl, carboxylic acid, alcohol, aldehyde, or ketone group.

[0302] Other protecting groups include, but are not limited to Fmoc, t-butoxycarbonyl (t-BOC), 9-fluoreneacetyl group, 1-fluorenecarboxylic group, 9-florenecarboxylic group, 9-fluorenone-1-carboxylic group, benzyloxycarbonyl, xanthyl (Xan), trityl (Trt), 4-methyltrityl (Mtt), 4-methoxytrityl (Mmt), 4-methoxy-2,3,6-trimethyl-benzenesulphonyl (Mtr), Mesitylene-2-sulphonyl (Mts), 4,4-dimethoxybenzhydryl (Mbh), Tosyl (Tos), 2,2,5,7,8-pentamethyl chroman-6-sulphonyl (Pmc), 4-methylbenzyl (MeBzl), 4-methoxybenzyl (MeOBzl), benzyloxy (BzlO), benzyl (Bzl), benzoyl (Bz), 3-nitro-2-pyridinesulphenyl (Npys), 1-(4,4-dimentyl-2,6-diaxocyclohexylidene)ethyl (Dde), 2,6-dichlorobenzyl (2,6-DiCl-Bzl), 2-chlorobenzyloxycarbonyl (2-Cl-Z), 2-bromobenzyloxycarbonyl (2-Br-Z), Benzyloxymethyl (Bom), cyclohexyloxy (cHxO), t-butoxymethyl (Bum), t-butoxy (tBuO), t-Butyl (tBu), Acetyl (Ac), and Trifluoroacetyl (TFA).

[0303] Protecting/blocking groups are well known to those of skill as are methods of coupling such groups to the appropriate residue(s) comprising the peptides of this invention (see, e.g., Greene et al., (1991) Protective Groups in Organic Synthesis, 2nd ed., John Wiley & Sons, Inc. Somerset, N.J.). In illustrative embodiment, for example, acetylation is accomplished during the synthesis when the peptide is on the resin using acetic anhydride. Amide protection can be achieved by the selection of a proper resin for the synthesis. For example, a rink amide resin can be used. After the completion of the synthesis, the semipermanent protecting groups on acidic bifunctional amino acids such as Asp and Glu and basic amino acid Lys, hydroxyl of Tyr are all simultaneously removed. The peptides released from such a resin using acidic treatment comes out with the n-terminal protected as acetyl and the carboxyl protected as NH₂ and with the simultaneous removal of all of the other protecting groups.

[0304] Where amino acid sequences are disclosed herein, amino acid sequences comprising, one or more protecting groups, e.g., as described above (or any other commercially available protecting groups for amino acids used, e.g., in boc or fmoc peptide synthesis) are also contemplated.

[0305] G) Peptide Circularization.

[0306] In certain embodiments the peptides described herein (e.g., AMPs, compound AMPs, STAMPs, etc.) are circularized/cyclized to produce cyclic peptides. Cyclic peptides, as contemplated herein, include head/tail, head/side chain, tail/side chain, and side chain/side chain cyclized peptides. In addition, peptides contemplated herein include homodet, containing only peptide bonds, and heterodet containing in addition disulfide, ester, thioester-bonds, or other bonds.

[0307] The cyclic peptides can be prepared using virtually any art-known technique for the preparation of cyclic peptides. For example, the peptides can be prepared in linear or non-cyclized form using conventional solution or solid phase peptide syntheses and cyclized using standard chemistries. Preferably, the chemistry used to cyclize the peptide will be sufficiently mild so as to avoid substantially degrading the peptide. Suitable procedures for synthesizing the peptides described herein as well as suitable chemistries for cyclizing the peptides are well known in the art.

[0308] In various embodiments cyclization can be achieved via direct coupling of the N- and C-terminus to form a peptide (or other) bond, but can also occur via the amino acid side chains. Furthermore it can be based on the use of other functional groups, including but not limited to amino, hydroxy, sulfhydryl, halogen, sulfonyl, carboxy, and thiocarboxy. These groups can be located at the amino acid side chains or be attached to their N- or C-terminus.

[0309] Accordingly, it is to be understood that the chemical linkage used to covalently cyclize the peptides of the invention need not be an amide linkage. In many instances it may be desirable to modify the N- and C-termini of the linear or non-cyclized peptide so as to provide, for example, reactive groups that may be cyclized under mild reaction conditions. Such linkages include, by way of example and not limitation amide, ester, thioester, CH₂—NH, etc. Techniques and reagents for synthesizing peptides having modified termini and chemistries suitable for cyclizing such modified peptides are well-known in the art.

[0310] Alternatively, in instances where the ends of the peptide are conformationally or otherwise constrained so as to make cyclization difficult, it may be desirable to attach linkers to the N- and/or C-termini to facilitate peptide cyclization. Of course, it will be appreciated that such linkers will bear reactive groups capable of forming covalent bonds with the termini of the peptide. Suitable linkers and chemistries are well-known in the art and include those previously described.

[0311] Cyclic peptides and depsipeptides (heterodetic peptides that include ester (depside) bonds as part of their backbone) have been well characterized and show a wide spectrum of biological activity. The reduction in conformational freedom brought about by cyclization often results in higher receptor-binding affinities. Frequently in these cyclic compounds, extra conformational restrictions are also built in, such as the use of D- and N-alkylated-amino acids, α,β-dehydro amino acids or α,α-disubstituted amino acid residues.

[0312] Methods of forming disulfide linkages in peptides are well known to those of skill in the art (see, e.g., Eichler and Houghten (1997) Protein Pept. Lett. 4: 157-164).

[0313] Reference may also be made to Marlowe (1993) Biorg. Med. Chem. Lett. 3: 437-44 who describes peptide cyclization on TFA resin using trimethylsilyl (TMSE) ester as an orthogonal protecting group; Pallin and Tam (1995) J. Chem. Soc. Chem. Comm. 2021-2022) who describe the cyclization of unprotected peptides in aqueous solution by oxime formation; Algin et al. (1994) Tetrahedron Lett. 35: 9633-9636 who disclose solid-phase synthesis of head-to-tail cyclic peptides via lysine side-chain anchoring; Kates et al. (1993) Tetrahedron Lett. 34: 1549-1552 who describe the production of head-to-tail cyclic peptides by three-dimensional solid phase strategy; Tumelty et al. (1994) J. Chem. Soc. Chem. Comm. 1067-1068, who describe the synthesis of cyclic peptides from an immobilized activated intermediate, where activation of the immobilized peptide is carried out with N-protecting group intact and subsequent removal leading to cyclization; McMurray et al. (1994) Peptide Res. 7: 195-206) who disclose head-to-tail cyclization of peptides attached to insoluble supports by means of the side chains of aspartic and glutamic acid; Hruby et al. (1994) Reactive Polymers 22: 231-241) who teach an alternate method for cyclizing peptides via solid supports; and Schmidt and Langer (1997) J. Peptide Res. 49: 67-73, who disclose a method for synthesizing cyclotetrapeptides and cyclopentapeptides.

[0314] These methods of peptide cyclization are illustrative and non-limiting. Using the teaching provide herein, other cyclization methods will be available to one of skill in the art.

[0315] H) Identification/Verification of Active Peptides

[0316] The active AMPs, STAMPs and the like can be identified and/or validated using an in vitro screening assay. Indeed, in many instances the AMPs and/or STAMPS described herein will be used in vitro as preservatives, topical antimicrobial treatments, and the like. Additionally, despite certain apparent limitations of in vitro susceptibility tests, clinical data indicate that a good correlation exists between minimal inhibitory concentration (MIC) test results and in vivo efficacy of antibiotic compounds (see, e.g., Murray et al. (1994) Antimicrobial Susceptibility Testing, Poupard et al., eds., Plenum Press, New York; Knudsen et al. (1995) Antimicrob. Agents Chemother. 39(6): 1253-1258; and the like). Thus, AMPs useful for treating infections and diseases related thereto are also conveniently identified by demonstrated in vitro antimicrobial activity against specified microbial targets, e.g., as illustrated in Table 4).

[0317] Typically, the in vitro antimicrobial activity of antimicrobial agents is tested using standard NCCLS bacterial inhibition assays, or MIC tests (see, National Committee on Clinical Laboratory Standards “Performance Standards for Antimicrobial Susceptibility Testing,” NCCLS Document M100-S5 Vol. 14, No. 16, December 1994; “Methods for dilution antimicrobial susceptibility test for bacteria that grow aerobically-Third Edition,” Approved Standard M7-A3, National Committee for Clinical Standards, Villanova, Pa.).

[0318] It will be appreciated that other assays as are well known in the art or that will become apparent to those having skill in the art upon review of this disclosure may also be used to identify active AMPs. Such assays include, for example, the assay described in Lehrer et al. (1988) J. Immunol. Meth., 108: 153 and Steinberg and Lehrer, “Designer Assays for Antimicrobial Peptides: Disputing the ‘One Size Fits All’ Theory,” In: Antibacterial Peptide Protocols, Shafer, Ed., Humana Press, N.J. Generally, active peptides of the invention will exhibit MICs (as measured using the assays described in the examples) of less than about 100 μM, preferably less than about 80 or 60 μM, more preferably about 50 μM or less, about 25 μM or less, or about 15 μM or less, or about 10 μM or less.

[0319] IV. Administration and Formulations.

[0320] A) Pharmaceutical Formulations.

[0321] In certain embodiments, the antimicrobial peptides and/or the chimeric constructs (e.g., targeting moieties attached to antimicrobial peptide(s), targeting moieties attached to detectable label(s), etc.) are administered to a mammal in need thereof, to a cell, to a tissue, to a composition (e.g., a food), etc.). In various embodiments the compositions can be administered to detect and/or locate, and/or quantify the presence of particular microorganisms, microorganism populations, biofilms comprising particular microorganisms, and the like. In various embodiments the compositions can be administered to inhibit particular microorganisms, microorganism populations, biofilms comprising particular microorganisms, and the like.

[0322] These active agents (antimicrobial peptides and/or chimeric moieties) can be administered in the “native” form or, if desired, in the form of salts, esters, amides, prodrugs, derivatives, and the like, provided the salt, ester, amide, prodrug or derivative is suitable pharmacologically, i.e., effective in the present method(s). Salts, esters, amides, prodrugs and other derivatives of the active agents can be prepared using standard procedures known to those skilled in the art of synthetic organic chemistry and described, for example, by March (1992) Advanced Organic Chemistry; Reactions, Mechanisms and Structure, 4th Ed. N.Y. Wiley-Interscience.

[0323] Methods of formulating such derivatives are known to those of skill in the art. For example, the disulfide salts of a number of delivery agents are described in PCT Publication WO 2000/059863 which is incorporated herein by reference. Similarly, acid salts of therapeutic peptides, peptoids, or other mimetics, and can be prepared from the free base using conventional methodology that typically involves reaction with a suitable acid. Generally, the base form of the drug is dissolved in a polar organic solvent such as methanol or ethanol and the acid is added thereto. The resulting salt either precipitates or can be brought out of solution by addition of a less polar solvent. Suitable acids for preparing acid addition salts include, but are not limited to both organic acids, e.g., acetic acid, propionic acid, glycolic acid, pyruvic acid, oxalic acid, malic acid, malonic acid, succinic acid, maleic acid, fumaric acid, tartaric acid, citric acid, benzoic acid, cinnamic acid, mandelic acid, methanesulfonic acid, ethanesulfonic acid, p-toluenesulfonic acid, salicylic acid, and the like, as well as inorganic acids, e.g., hydrochloric acid, hydrobromic acid, sulfuric acid, nitric acid, phosphoric acid, and the like. An acid addition salt can be reconverted to the free base by treatment with a suitable base. Certain particularly preferred acid addition salts of the active agents herein include halide salts, such as may be prepared using hydrochloric or hydrobromic acids. Conversely, preparation of basic salts of the active agents of this invention are prepared in a similar manner using a pharmaceutically acceptable base such as sodium hydroxide, potassium hydroxide, ammonium hydroxide, calcium hydroxide, trimethylamine, or the like. In certain embodiments basic salts include alkali metal salts, e.g., the sodium salt, and copper salts.

[0324] For the preparation of salt forms of basic drugs, the pKa of the counterion is preferably at least about 2 pH lower than the pKa of the drug. Similarly, for the preparation of salt forms of acidic drugs, the pKa of the counterion is preferably at least about 2 pH higher than the pKa of the drug. This permists the counterion to bring the solution's pH to a level lower than the pHmax to reach the salt plateau, at which the solubility of salt prevails over the solubility of free acid or base. The generalized rule of difference in pKa units of the ionizable group in the active pharmaceutical ingredient (API) and in the acid or base is meant to make the proton transfer energetically favorable. When the pKa of the API and counterion are not significantly different, a solid complex may form but may rapidly disproportionate (i.e., break down into the individual entities of drug and counterion) in an aqueous environment.

[0325] Preferably, the counterion is a pharmaceutically acceptable counterion. Suitable anionic salt forms include, but are not limited to acetate, benzoate, benzylate, bitartrate, bromide, carbonate, chloride, citrate, edetate, edisylate, estolate, fumarate, gluceptate, gluconate, hydrobromide, hydrochloride, iodide, lactate, lactobionate, malate, maleate, mandelate, mesylate, methyl bromide, methyl sulfate, mucate, napsylate, nitrate, pamoate (embonate), phosphate and diphosphate, salicylate and disalicylate, stearate, succinate, sulfate, tartrate, tosylate, triethiodide, valerate, and the like, while suitable cationic salt forms include, but are not limited to aluminum, benzathine, calcium, ethylene diamine, lysine, magnesium, meglumine, potassium, procaine, sodium, tromethamine, zinc, and the like.

[0326] In various embodiments preparation of esters typically involves functionalization of hydroxyl and/or carboxyl groups that are present within the molecular structure of the active agent. In certain embodiments, the esters are typically acyl-substituted derivatives of free alcohol groups, i.e., moieties that are derived from carboxylic acids of the formula RCOOH where R is alky, and preferably is lower alkyl. Esters can be reconverted to the free acids, if desired, by using conventional hydrogenolysis or hydrolysis procedures.

[0327] Amides can also be prepared using techniques known to those skilled in the art or described in the pertinent literature. For example, amides may be prepared from esters, using suitable amine reactants, or they may be prepared from an anhydride or an acid chloride by reaction with ammonia or a lower alkyl amine.

[0328] In various embodiments, the active agents identified herein are useful for parenteral, topical, oral, nasal (or otherwise inhaled), rectal, or local administration, such as by aerosol or transdermally, for detection and/or quantification, and or localization, and/or prophylactic and/or therapeutic treatment of infection (e.g., microbial infection). The compositions can be administered in a variety of unit dosage forms depending upon the method of administration. Suitable unit dosage forms, include, but are not limited to powders, tablets, pills, capsules, lozenges, suppositories, patches, nasal sprays, injectibles, implantable sustained-release formulations, lipid complexes, etc.

[0329] The active agents (e.g., antimicrobial peptides and/or chimeric constructs) described herein can also be combined with a pharmaceutically acceptable carrier (excipient) to form a pharmacological composition. In certain embodiments, pharmaceutically acceptable carriers include those approved by a regulatory agency of the Federal or a state government or listed in the U.S. Pharmacopeia or other generally recognized pharmacopeia for use in/on animals, and more particularly in/on humans. A “carrier” refers to, for example, a diluent, adjuvant, excipient, auxiliary agent or vehicle with which an active agent of the present invention is administered.

[0330] Pharmaceutically acceptable carriers can contain one or more physiologically acceptable compound(s) that act, for example, to stabilize the composition or to increase or decrease the absorption of the active agent(s). Physiologically acceptable compounds can include, for example, carbohydrates, such as glucose, sucrose, or dextrans, antioxidants, such as ascorbic acid or glutathione, chelating agents, low molecular weight proteins, protection and uptake enhancers such as lipids, compositions that reduce the clearance or hydrolysis of the active agents, or excipients or other stabilizers and/or buffers.

[0331] Other physiologically acceptable compounds, particularly of use in the preparation of tablets, capsules, gel caps, and the like include, but are not limited to binders, diluent/fillers, disentegrants, lubricants, suspending agents, and the like.

[0332] In certain embodiments, to manufacture an oral dosage form (e.g., a tablet), an excipient (e.g., lactose, sucrose, starch, mannitol, etc.), an optional disintegrator (e.g. calcium carbonate, carboxymethylcellulose calcium, sodium starch glycollate, crospovidone etc.), a binder (e.g. alpha-starch, gum arabic, microcrystalline cellulose, carboxymethylcellulose, polyvinylpyrrolidone, hydroxypropylcellulose, cyclodextrin, etc.), and an optional lubricant (e.g., talc, magnesium stearate, polyethylene glycol 6000, etc.), for instance, are added to the active component or components (e.g., active peptide) and the resulting composition is compressed. Where necessary the compressed product is coated, e.g., known methods for masking the taste or for enteric dissolution or sustained release. Suitable coating materials include, but are not limited to ethyl-cellulose, hydroxymethylcellulose, polyoxyethylene glycol, cellulose acetate phthalate, hydroxypropylmethylcellulose phthalate, and Eudragit (Rohm & Haas, Germany; methacrylic-acrylic copolymer).

[0333] Other physiologically acceptable compounds include wetting agents, emulsifying agents, dispersing agents or preservatives that are particularly useful for preventing the growth or action of microorganisms. Various preservatives are well known and include, for example, phenol and ascorbic acid. One skilled in the art would appreciate that the choice of pharmaceutically acceptable carrier(s), including a physiologically acceptable compound depends, for example, on the route of administration of the active agent(s) and on the particular physio-chemical characteristics of the active agent(s).

[0334] In certain embodiments the excipients are sterile and generally free of undesirable matter. These compositions can be sterilized by conventional, well-known sterilization techniques. For various oral dosage form excipients such as tablets and capsules sterility is not required. The USP/NF standard is usually sufficient.

[0335] In certain therapeutic applications, the compositions of this invention are administered, e.g., topically administered or administered to the oral or nasal cavity, to a patient suffering from infection or at risk for infection or prophylactically to prevent dental caries or other pathologies of the teeth or oral mucosa characterized by microbial infection in an amount sufficient to prevent and/or cure and/or at least partially prevent or arrest the disease and/or its complications. An amount adequate to accomplish this is defined as a “therapeutically effective dose.” Amounts effective for this use will depend upon the severity of the disease and the general state of the patient's health. Single or multiple administrations of the compositions may be administered depending on the dosage and frequency as required and tolerated by the patient. In any event, the composition should provide a sufficient quantity of the active agents of the formulations of this invention to effectively treat (ameliorate one or more symptoms in) the patient.

[0336] The concentration of active agent(s) can vary widely, and will be selected primarily based on activity of the active ingredient(s), body weight and the like in accordance with the particular mode of administration selected and the patient's needs. Concentrations, however, will typically be selected to provide dosages ranging from about 0.1 or 1 mg/kg/day to about 50 mg/kg/day and sometimes higher. Typical dosages range from about 3 mg/kg/day to about 3.5 mg/kg/day, preferably from about 3.5 mg/kg/day to about 7.2 mg/kg/day, more preferably from about 7.2 mg/kg/day to about 11.0 mg/kg/day, and most preferably from about 11.0 mg/kg/day to about 15.0 mg/kg/day. In certain preferred embodiments, dosages range from about 10 mg/kg/day to about 50 mg/kg/day. In certain embodiments, dosages range from about 20 mg to about 50 mg given orally twice daily. It will be appreciated that such dosages may be varied to optimize a therapeutic and/or phophylactic regimen in a particular subject or group of subjects.

[0337] In certain embodiments, the active agents of this invention are administered to the oral cavity. This is readily accomplished by the use of lozenges, aersol sprays, mouthwash, coated swabs, and the like.

[0338] In certain embodiments, the active agent(s) of this invention are administered topically, e.g., to the skin surface, to a topical lesion or wound, to a surgical site, and the like.

[0339] In certain embodiments the active agents of this invention are administered systemically (e.g., orally, or as an injectable) in accordance with standard methods well known to those of skill in the art. In other preferred embodiments, the agents, can also be delivered through the skin using conventional transdermal drug delivery systems, i.e., transdermal “patches” wherein the active agent(s) are typically contained within a laminated structure that serves as a drug delivery device to be affixed to the skin. In such a structure, the drug composition is typically contained in a layer, or “reservoir,” underlying an upper backing layer. It will be appreciated that the term “reservoir” in this context refers to a quantity of “active ingredient(s)” that is ultimately available for delivery to the surface of the skin. Thus, for example, the “reservoir” may include the active ingredient(s) in an adhesive on a backing layer of the patch, or in any of a variety of different matrix formulations known to those of skill in the art. The patch may contain a single reservoir, or it may contain multiple reservoirs.

[0340] In one embodiment, the reservoir comprises a polymeric matrix of a pharmaceutically acceptable contact adhesive material that serves to affix the system to the skin during drug delivery. Examples of suitable skin contact adhesive materials include, but are not limited to, polyethylenes, polysiloxanes, polyisobutylenes, polyacrylates, polyurethanes, and the like. Alternatively, the drug-containing reservoir and skin contact adhesive are present as separate and distinct layers, with the adhesive underlying the reservoir which, in this case, may be either a polymeric matrix as described above, or it may be a liquid or hydrogel reservoir, or may take some other form. The backing layer in these laminates, which serves as the upper surface of the device, preferably functions as a primary structural element of the “patch” and provides the device with much of its flexibility. The material selected for the backing layer is preferably substantially impermeable to the active agent(s) and any other materials that are present.

[0341] Other formulations for topical delivery include, but are not limited to, ointments, gels, sprays, fluids, and creams. Ointments are semisolid preparations that are typically based on petrolatum or other petroleum derivatives. Creams containing the selected active agent are typically viscous liquid or semisolid emulsions, often either oil-in-water or water-in-oil. Cream bases are typically water-washable, and contain an oil phase, an emulsifier and an aqueous phase. The oil phase, also sometimes called the “internal” phase, is generally comprised of petrolatum and a fatty alcohol such as cetyl or stearyl alcohol; the aqueous phase usually, although not necessarily, exceeds the oil phase in volume, and generally contains a humectant. The emulsifier in a cream formulation is generally a nonionic, anionic, cationic or amphoteric surfactant. The specific ointment or cream base to be used, as will be appreciated by those skilled in the art, is one that will provide for optimum drug delivery. As with other carriers or vehicles, an ointment base should be inert, stable, nonirritating and nonsensitizing.

[0342] As indicated above, various buccal, and sublingual formulations are also contemplated.

[0343] In certain embodiments, one or more active agents of the present invention can be provided as a “concentrate”, e.g., in a storage container (e.g., in a premeasured volume) ready for dilution, or in a soluble capsule ready for addition to a volume of water, alcohol, hydrogen peroxide, or other diluent.

[0344] While the invention is described with respect to use in humans, it is also suitable for animal, e.g., veterinary use. Thus certain preferred organisms include, but are not limited to humans, non-human primates, canines, equines, felines, porcines, ungulates, largomorphs, and the like.

[0345] B) Nanoemulsion Formulations.

[0346] In certain embodiments the targeting peptides, antimicrobial peptides and/or chimeric moieties (e.g., STAMPs) as described herein are formulated in a nanoemulsion. Nanoemulsions include, but are not limited to oil in water (0/W) nanoemulsions, and water in oil (W/O) nanoemulsions. Nanoemulsions can be defined as emulsions with mean droplet diameters ranging from about 20 to about 1000 nm. Usually, the average droplet size is between about 20 nm or 50 nm and about 500 nm. The terms sub-micron emulsion (SME) and mini-emulsion are used as synonyms.

[0347] Illustrative oil in water (O/W) nanoemulsions include, but are not limited to:

[0348] Surfactant micelles—micelles composed of small molecules surfactants or detergents (e.g., SDS/PBS/2-propanol) which are suitable for predominantly hydrophobic peptides.

[0349] Polymer micelles—micelles composed of polymer, copolymer, or block copolymer surfactants (e.g., Pluronic L64/PBS/2-propanol) which are suitable for predominantly hydrophobic peptides;

[0350] Blended micelles: micelles in which there is more than one surfactant component or in which one of the liquid phases (generally an alcohol or fatty acid compound) participates in the formation of the micelle (e.g., Octanoic acid/PBS/EtOH) which are suitable for predominantly hydrophobic peptides;

[0351] Integral peptide micelles—blended micelles in which the peptide serves as an auxiliary surfactant, forming an integral part of the micelle (e.g., amphipathic peptide/PBS/mineral oil) which are suitable for amphipathic peptides; and

[0352] Pickering (solid phase) emulsions—emulsions in which the peptides are associated with the exterior of a solid nanoparticle (e.g., polystyrene nanoparticles/PBS/no oil phase) which are suitable for amphipathic peptides.

[0353] Illustrative water in oil (W/O) nanoemulsions include, but are not limited to:

[0354] Surfactant micelles—micelles composed of small molecules surfactants or detergents (e.g., dioctyl sulfosuccinate/PBS/2-propanol, Isopropylmyristate/PBS/2-propanol, etc.) which are suitable for predominantly hydrophilic peptides;

[0355] Polymer micelles—micelles composed of polymer, copolymer, or block copolymer surfactants (e.g., PLURONIC® L121/PBS/2-propanol), which are suitable for predominantly hydrophilic peptides;

[0356] Blended micelles—micelles in which there is more than one surfactant component or in which one of the liquid phases (generally an alcohol or fatty acid compound) participates in the formation of the micelle (e.g., capric/caprylic diglyceride/PBS/EtOH) which are suitable for predominantly hydrophilic peptides;

[0357] Integral peptide micelles—blended micelles in which the peptide serves as an auxiliary surfactant, forming an integral part of the micelle (e.g., amphipathic peptide/PBS/polypropylene glycol) which are suitable for amphipathic peptides; and

[0358] Pickering (solid phase) emulsions—emulsions in which the peptides are associated with the exterior of a solid nanoparticle (e.g., chitosan nanoparticles/no aqueous phase/mineral oil) which are suitable for amphipathic peptides.

[0359] As indicated above, in certain embodiments the nanoemulsions comprise one or more surfactants or detergents. In some embodiments the surfactant is a non-anionic detergent (e.g., a polysorbate surfactant, a polyoxyethylene ether, etc.). Surfactants that find use in the present invention include, but are not limited to surfactants such as the TWEEN®, TRITON®, and TYLOXAPOL® families of compounds.

[0360] In certain embodiments the emulsions further comprise one or more cationic halogen containing compounds, including but not limited to, cetylpyridinium chloride. In still further embodiments, the compositions further comprise one or more compounds that increase the interaction (“interaction enhancers”) of the composition with microorganisms (e.g., chelating agents like ethylenediaminetetraacetic acid, or ethylenebis(oxyethylenenitrilo)tetraacetic acid in a buffer).

[0361] In some embodiments, the nanoemulsion further comprises an emulsifying agent to aid in the formation of the emulsion. Emulsifying agents include compounds that aggregate at the oil/water interface to form a kind of continuous membrane that prevents direct contact between two adjacent droplets. Certain embodiments of the present invention feature oil-in-water emulsion compositions that may readily be diluted with water to a desired concentration without impairing their anti-pathogenic properties.

[0362] In addition to discrete oil droplets dispersed in an aqueous phase, certain oil-in-water emulsions can also contain other lipid structures, such as small lipid vesicles (e.g., lipid spheres that often consist of several substantially concentric lipid bilayers separated from each other by layers of aqueous phase), micelles (e.g., amphiphilic molecules in small clusters of 50-200 molecules arranged so that the polar head groups face outward toward the aqueous phase and the apolar tails are sequestered inward away from the aqueous phase), or lamellar phases (lipid dispersions in which each particle consists of parallel amphiphilic bilayers separated by thin films of water).

[0363] These lipid structures are formed as a result of hydrophobic forces that drive apolar residues (e.g., long hydrocarbon chains) away from water. The above lipid preparations can generally be described as surfactant lipid preparations (SLPs). SLPs are minimally toxic to mucous membranes and are believed to be metabolized within the small intestine (see e.g., Hamouda et al., (1998) J. Infect. Disease 180: 1939).

[0364] In certain embodiments the emulsion comprises a discontinuous oil phase distributed in an aqueous phase, a first component comprising an alcohol and/or glycerol, and a second component comprising a surfactant or a halogen-containing compound. The aqueous phase can comprise any type of aqueous phase including, but not limited to, water (e.g., dionized water, distilled water, tap water) and solutions (e.g., phosphate buffered saline solution, or other buffer systems). The oil phase can comprise any type of oil including, but not limited to, plant oils (e.g., soybean oil, avocado oil, flaxseed oil, coconut oil, cottonseed oil, squalene oil, olive oil, canola oil, corn oil, rapeseed oil, safflower oil, and sunflower oil), animal oils (e.g., fish oil), flavor oil, water insoluble vitamins, mineral oil, and motor oil. In certain embodiments, the oil phase comprises 30-90 vol % of the oil-in-water emulsion (i.e., constitutes 30-90% of the total volume of the final emulsion), more preferably 50-80%.

[0365] In certain embodiments the alcohol, when present, is ethanol.

[0366] While the present invention is not limited by the nature of the surfactant, in some preferred embodiments, the surfactant is a polysorbate surfactant (e.g., TWEEN 20®, TWEEN 40®, TWEEN 60®, and TWEEN 80®), a pheoxypolyethoxyethanol (e.g., TRITON® X-100, X-301, X-165, X-102, and X-200, and TYLOXAPOL®), or sodium dodecyl sulfate, and the like.

[0367] In certain embodiments a halogen-containing component is present. the nature of the halogen-containing compound, in some preferred embodiments the halogen-containing compound comprises a chloride salt (e.g., NaCl, KCl, etc.), a cetylpyridinium halide, a cetyltrimethylammonium halide, a cetyldimethylethylammonium halide, a cetyldimethylbenzylammonium halide, a cetyltributylphosphonium halide, dodecyltrimethylammonium halides, tetradecyltrimethylammonium halides, cetylpyridinium chloride, cetyltrimethylammonium chloride, cetylbenzyldimethylammonium chloride, cetylpyridinium bromide, cetyltrimethylammonium bromide, cetyldimethylethylammonium bromide, cetyltributylphosphonium bromide, dodecyltrimethylammonium bromide, tetradecyltrimethylammonium bromide, and the like

[0368] In certain embodiments the emulsion comprises a quaternary ammonium compound. Quaternary ammonium compounds include, but are not limited to, N-alkyldimethyl benzyl ammonium saccharinate, 1,3,5-Triazine-1,3,5(2H,4H,6H)-triethanol; 1-Decanaminium, N-decyl-N,N-dimethyl-, chloride (or) Didecyl dimethyl ammonium chloride; 2-(2-(p-(Diisobuyl)cresosxy)ethoxy)ethyl dimethyl benzyl ammonium chloride; 2-(2-(p-(Diisobutyl)phenoxy)ethoxy)ethyl dimethyl benzyl ammonium chloride; alkyl 1 or 3 benzyl-1-(2-hydroxethyl)-2-imidazolinium chloride; alkyl bis(2-hydroxyethyl)benzyl ammonium chloride; alkyl demethyl benzyl ammonium chloride; alkyl dimethyl 3,4-dichlorobenzyl ammonium chloride (100% C12); alkyl dimethyl 3,4-dichlorobenzyl ammonium chloride (50% C14, 40% C12, 10% C16); alkyl dimethyl 3,4-dichlorobenzyl ammonium chloride (55% C14, 23% C12, 20% C16); alkyl dimethyl benzyl ammonium chloride; alkyl dimethyl benzyl ammonium chloride (100% C14); alkyl dimethyl benzyl ammonium chloride (100% C16); alkyl dimethyl benzyl ammonium chloride (41% C14, 28% C12); alkyl dimethyl benzyl ammonium chloride (47% C12, 18% C14); alkyl dimethyl benzyl ammonium chloride (55% C16, 20% C14); alkyl dimethyl benzyl ammonium chloride (58% C14, 28% C16); alkyl dimethyl benzyl ammonium chloride (60% C14, 25% C12); alkyl dimethyl benzyl ammonium chloride (61% C11, 23% C14); alkyl dimethyl benzyl ammonium chloride (61% C12, 23% C14); alkyl dimethyl benzyl ammonium chloride (65% C12, 25% C14); alkyl dimethyl benzyl ammonium chloride (67% C12, 24% C14); alkyl dimethyl benzyl ammonium chloride (67% C12, 25% C14); alkyl dimethyl benzyl ammonium chloride (90% C14, 5% C12); alkyl dimethyl benzyl ammonium chloride (93% C14, 4% C12); alkyl dimethyl benzyl ammonium chloride (95% C16, 5% C18); alkyl dimethyl benzyl ammonium chloride (and) didecyl dimethyl ammonium chloride; alkyl dimethyl benzyl ammonium chloride (as in fatty acids); alkyl dimethyl benzyl ammonium chloride (C12-C16); alkyl dimethyl benzyl ammonium chloride (C12-C18); alkyl dimethyl benzyl and dialkyl dimethyl ammonium chloride; alkyl dimethyl dimethybenzyl ammonium chloride; alkyl dimethyl ethyl ammonium bromide (90% C14, 5% C16, 5% C12); alkyl dimethyl ethyl ammonium bromide (mixed alkyl and alkenyl groups as in the fatty acids of soybean oil); alkyl dimethyl ethylbenzyl ammonium chloride; alkyl dimethyl ethylbenzyl ammonium chloride (60% C14); alkyl dimethyl isoproylbenzyl ammonium chloride (50% C12, 30% C14, 17% C16, 3% C18); alkyl trimethyl ammonium chloride (58% C18, 40%

[0369] C16, 1% C14, 1% C12); alkyl trimethyl ammonium chloride (90% C18, 10% C16); alkyldimethyl(ethylbenzyl) ammonium chloride (C12-18); Di-(C8-10)-alkyl dimethyl ammonium chlorides; dialkyl dimethyl ammonium chloride; dialkyl dimethyl ammonium chloride; dialkyl dimethyl ammonium chloride; dialkyl methyl benzyl ammonium chloride; didecyl dimethyl ammonium chloride; diisodecyl dimethyl ammonium chloride; dioctyl dimethyl ammonium chloride; dodecyl bis(2-hydroxyethyl) octyl hydrogen ammonium chloride; dodecyl dimethyl benzyl ammonium chloride; dodecylcarbamoyl methyl dimethyl benzyl ammonium chloride; heptadecyl hydroxyethylimidazolinium chloride; hexahydro-1,3,5-thris(2-hydroxyethyl)-s-triazine; myristalkonium chloride (and) Quat RNIUM 14; N,N-Dimethyl-2-hydroxypropylammonium chloride polymer; n-alkyl dimethyl benzyl ammonium chloride; n-alkyl dimethyl ethylbenzyl ammonium chloride; n-tetradecyl dimethyl benzyl ammonium chloride monohydrate; octyl decyl dimethyl ammonium chloride; octyl dodecyl dimethyl ammonium chloride; octyphenoxyethoxyethyl dimethyl benzyl ammonium chloride; oxydiethylenebis (alkyl dimethyl ammonium chloride); quaternary ammonium compounds, dicoco alkyldimethyl, chloride; trimethoxysily propyl dimethyl octadecyl ammonium chloride; trimethoxysilyl quats, trimethyl dodecylbenzyl ammonium chloride; n-dodecyl dimethyl ethylbenzyl ammonium chloride; n-hexadecyl dimethyl benzyl ammonium chloride; n-tetradecyl dimethyl benzyl ammonium chloride; n-tetradecyl dimethyl ethylbenzyl ammonium chloride; and n-octadecyl dimethyl benzyl ammonium chloride.

[0370] Nanoemulsion formulations and methods of making such are well known to those of skill in the art and described for example in U.S. Pat. Nos: 7,476,393, 7,468,402, 7,314,624, 6,998,426, 6,902,737, 6,689,371, 6,541,018, 6,464,990, 6,461,625, 6,419,946, 6,413,527, 6,375,960, 6,335,022, 6,274,150, 6,120,778, 6,039,936, 5,925,341, 5,753,241, 5,698,219, an d5,152,923 and in Fanun et al. (2009) Microemulsions: Properties and Applications (Surfactant Science), CRC Press, Boca Ratan Fla.

[0371] C) Formulations Optimizing Activity.

[0372] In certain embodiments, formulations are selected to optimize binding specificity, and/or binding avidity, and/or antimicrobial activity, and/or stability/conformation of the targeting peptide, antimicrobial peptide, chimeric moiety, and/or STAMP. In this regard, it was a surprising discovery that the activity of certain STAMPs, and presumably the constituent targeting peptides and/or antimicrobial peptides was optimized in the presence of a salt. Accordingly, certain embodiments are contemplated where the targeting peptide and/or antimicrobial peptide, and/or STAMP is formulated in combination with one or more salts. The formulatiosn disclosed herein, however, are not limited to those containing salt(s). Embodiments, are also contemplated where the targeting peptide and/or antimicrobial peptide, and/or STAMP is formulated without the presence of a salt.

[0373] In certain embodiments, sodium chloride plus a little potassium chloride resulted in the best activity of the salts tested. However, other salts, e.g., CaCl₂, MgCL₂, MnCl₂ also enhanced activity. Accordingly, in certain embodiments, it is contemplated that the targeting peptide(s), and/or antimicrobial peptide(s), and/or chimeric moieties, and/or STAMPs are formulated with one or more salts.

[0374] In certain embodiments suitable salts include any of a number of pharmaceutically acceptable salts. Representative salts include the hydrobromide, hydrochloride, sulfate, bisulfate, phosphate, nitrate, acetate, valerate, oleate, palmitate, stearate, laurate, benzoate, lactate, phosphate, tosylate, citrate, maleate, fumarate, succinate, tartrate, napthylate, mesylate, besylate, glucoheptonate, lactobionate, and laurylsulphonate salts and the like (see, e.g., Berge et al. (1977) J. Pharm. Sci. 66: 1-19), although it is noted that citrate salts appear to inhibit the activity of certain STAMPs.

[0375] In certain embodiments pharmaceutically acceptable salts of the present invention include the conventional nontoxic salts or quaternary ammonium salts of the compounds, e.g., from non-toxic organic or inorganic acids. For example, such conventional nontoxic salts include those derived from inorganic acids such as hydrochloride, hydrobromic, sulfuric, sulfamic, phosphoric, nitric, and the like; and the salts prepared from organic acids such as acetic, propionic, succinic, glycolic, stearic, lactic, malic, tartaric, citric, ascorbic, palmitic, maleic, hydroxymaleic, phenylacetic, glutamic, benzoic, salicyclic, sulfanilic, 2-acetoxybenzoic, fumaric, toluenesulfonic, methanesulfonic, benzenesulfonic, ethane disulfonic, oxalic, isothionic, and the like.

[0376] In other cases, the compounds of the present invention may contain one or more acidic functional groups and, thus, are capable of forming pharmaceutically-acceptable salts with pharmaceutically-acceptable bases. The term “pharmaceutically-acceptable salts” in these instances refers to the relatively non-toxic, inorganic and organic base addition salts of compounds of the present invention. These salts can likewise be prepared in situ in the administration vehicle or the dosage form manufacturing process, or by separately treating the compound in its free acid form with a suitable base, such as the hydroxide, carbonate or bicarbonate of a pharmaceutically-acceptable metal cation, with ammonia, or with a pharmaceutically-acceptable organic primary, secondary or tertiary amine. Representative alkali or alkaline earth salts include the lithium, sodium, potassium, calcium, magnesium, and aluminum salts and the like. Representative organic amines useful for the formation of base addition salts include ethylamine, diethylamine, ethylenediamine, ethanolamine, diethanolamine, piperazine and the like (see, for example, Berge et al., supra; and Stahl and Wermuth (2002) Handbook of Pharmaceutical Salts : Properties, Selection, and Use, Wiley-VCH, Zurich, Switzerland).

[0377] In various embodiments, the salt is simply a sodium chloride and/or a potassium chloride and can readily be prepared, for example, as a phosphate buffered saline (PBS) solution. In certain embodiments, the salt concentration is comparable to that found in 0.5× PBS to about 2.5× PBS, more preferably from about 0.5× PBS to about 1.5× PBS. In certain embodiments optimum activity has been observed in 1× PBS.

[0378] In various embodiments, the pH of the formulation ranges from about pH 5.0 to about pH 8.5, preferably from about pH 6.0 to about pH 8.0, more preferably from about pH 7.0 to about pH 8.0. In certain embodiments the pH is about pH 7.4.

[0379] While optimum results have been observed for certain STAMPs using a PBS buffer system, other buffer systems are also acceptable. Such buffers include, but are not limited to sulfate buffers, carbonate buffers, Tris buffers, CHAPS buffers, PIPES buffers, and the like, as long as the salt is included.

[0380] In various embodiments, the targeting peptide, and/or antimicrobial peptide, and/or chimeric moiety, and/or STAMP is present in the formulation at a concentration ranging from about 1 nM, to about 1, 10, or 100 mM, more preferably from about 1 nM, about 10 nM, about 100 nM, about 1 μM, or about 10 μM to about 50 μM, about 100 μM, about 200 μm, about 300 μM, about 400 μM, or about 500 μM, preferably from about 1 μM, about 10 μM, about 25 μM, or about 50 μM to about 1 mM, about 10 mM, about 20 mM, or about 5 mM, most preferably from about 10 μM, about 20 μM, or about 50 μM to about 100 μM, about 150 μM, or about 200 μM.

[0381] D) Home Health Care/Hygiene Product Formulations.

[0382] In certain embodiments, one or more of the targeting peptide(s), and/or antimicrobial peptides (AMPs) and/or chimeric moieties, and/or STAMPS described herein are incorporated into healthcare formulations, e.g., for home use. Such formulations include, but are not limited to toothpaste, mouthwash, tooth whitening strips or solutions, contact lens storage, wetting, or cleaning solutions, dental floss, toothpicks, toothbrush bristles, oral sprays, oral lozenges, nasal sprays, aerosolizers for oral and/or nasal application, wound dressings (e.g., bandages), and the like.

[0383] For example, chimeric moieties and/or STAMPs, and/or AMPs directed against S. mutans are well suited for inhibiting frequency or severity of dental caries formation, plaque formation, periodontal disease, and/or halitosis.

[0384] Chimeric moieties and/or STAMPs, and/or AMPs directed against Corynebacterium spp, when applied to a skin surface can reduce/eliminate Corynebacterium resulting in a reduction of odors. Such moieties are readily incorporated in soaps, antibiotics, antiseptics, disinfectants, and the like.

[0385] The formulation of such health products is well known to those of skill, and the antimicrobial peptides and/or chimeric constructs are simply added to such formulations in an effective dose (e.g., a prophylactic dose to inhibit dental carie formation, etc.).

[0386] For example, toothpaste formulations are well known to those of skill in the art. Typically such formulations are mixtures of abrasives and surfactants; anticaries agents, such as fluoride; tartar control ingredients, such as tetrasodium pyrophosphate and methyl vinyl ether/maleic anhydride copolymer; pH buffers; humectants, to prevent dry-out and increase the pleasant mouth feel; and binders, to provide consistency and shape (see, e.g., Table 17). Binders keep the solid phase properly suspended in the liquid phase to prevent separation of the liquid phase out of the toothpaste. They also provide body to the dentifrice, especially after extrusion from the tube onto the toothbrush.

TABLE 17
Typical components of toothpaste.

| Ingredients | Wt % |
|---|---|
| Humectants | 40-70 |
| Water | 0-50 |
| Buffers/salts/tartar | 0.5-10 |
| control | |
| Organic thickeners | 0.4-2 |
| (gums) | |
| Inorganic thickeners | 0-12 |
| Abrasives | 10-50 |
| Actives (e.g., triclosan) | 0.2-1.5 |
| Surfactants | 0.5-2 |
| Flavor and sweetener | 0.8-1.5 |

Fluoride sources provide 1000-15000 ppm fluorine.

[0387] Table 18 lists typical ingredients used in formulations; the final combination will depend on factors such as ingredient compatibility and cost, local customs, and desired benefits and quality to be delivered in the product. It will be recognized that one or more antimicrobial peptides and/or chimeric constructs described herein can simply be added to such formulations or used in place of one or more of the other ingredients.

TABLE 18
List of typical ingredients.

| | | | | | Tartar |
|---|---|---|---|---|---|
| | Inorganic | | | | Control |
| Gums | Thickeners | Abrasives | Surfactants | Humectants | Ingredient |
| Sodium | Silica | Hydrated | Sodium | Glycerine | Tetrasodium |
| carboxymethyl | thickeners | silica | lauryl sulfate | | pyrophosphate |
| cellulose | | | | | |
| Cellulose ethers | Sodium | Dicalcium | Sodium N- | Sorbitol | Gantrez S-70 |
| | aluminum | phosphate | lauryl | | |
| | silicates | digydrate | sarcosinate | | |
| Xanthan Gum | Clays | Calcium | Pluronics | Propylene | Sodium tri- |
| | | carbonate | | glycol | polyphosphate |
| Carrageenans | | Sodium | | Xylitol | |
| | | bicarbonate | | | |
| Sodium alginate | | Calcium | Sodium | Polyethylene | |
| | | pyrophosphate | lauryl | glycol | |
| | | | sulfoacetate | | |
| Carbopols | | Alumina | | | |

[0388] One illustrative formulation described in U.S. Pat. No. 6,113,887 comprises (1) a water-soluble bactericide selected from the group consisting of pyridinium compounds, quaternary ammonium compounds and biguanide compounds in an amount of 0.001% to 5.0% by weight, based on the total weight of the composition; (2) a cationically-modified hydroxyethylcellulose having an average molecular weight of 1,000,000 or higher in the hydroxyethylcellulose portion thereof and having a cationization degree of 0.05 to 0.5 mol/glucose in an amount of 0.5% to 5.0% by weight, based on the total weight of the composition; (3) a surfactant selected from the group consisting of polyoxyethylene polyoxypropylene block copolymers and alkylolamide compounds in an amount of 0.5% to 13% by weight, based on the total weight of the composition; and (4) a polishing agent of the non-silica type in an amount of 5% to 50% by weight, based on the total weight of the composition. In certain embodiments, the antimicrobial peptide(s) and/or chimeric construct(s) described herein can be used in place of the bactericide or in combination with the bactericide.

[0389] Similarly, mouthwash formulations are also well known to those of skill in the art. Thus, for example, mouthwashes containing sodium fluoride are disclosed in U.S. Pat. Nos. 2,913,373, 3,975,514, and 4,548,809, and in US Patent Publications US 2003/0124068 A1, US 2007/0154410 A1, and the like. Mouthwashes containing various alkali metal compounds are also known: sodium benzoate (WO 9409752); alkali metal hypohalite (US 20020114851A1); chlorine dioxide (CN 1222345); alkali metal phosphate (US 2001/0002252 A1, US 2003/0007937 A1); hydrogen sulfate/carbonate (JP 8113519); cetylpyridium chloride(CPC) (see, e.g., U.S. Pat. No. 6,117,417, U.S. Pat. No. 5,948,390, and JP 2004051511).

[0390] Mouthwashes containing higher alcohol (see, e.g., US 2002/0064505 A1, US 2003/0175216 A1); hydrogen peroxide (see, e.g., CN 1385145); CO₂ gas bubbles (see, e.g., JP 1275521 and JP 2157215) are also known. In certain embodiments, these and other mouthwash formulations can further comprise one or more of the AMPs or compound AMPs of this invention.

[0391] Contact lens storage, wetting, or cleaning solutions, dental floss, toothpicks, toothbrush bristles, oral sprays, oral lozenges, nasal sprays, and aerosolizers for oral and/or nasal application, and the like are also well known to those of skill in the art and can readily be adapted to incorporate one or more antimicrobial peptide(s) and/or chimeric construct(s) described herein.

[0392] The foregoing pharmaceutical and/or home healthcare formulations and/or devices are meant to be illustrative and not limiting. Using teaching provided herein, the antimicrobial peptide(s) and/or chimeric construct(s) described herein can readily be incorporated into other products.

[0393] E) Illustrative Oral Care Formulations.

[0394] The targeting peptide(s), and/or antimicrobial peptide(s), and/or chimeric moieties, and/or STAMPs described herein can be used for a number of applications, e.g., as described above. In certain embodiments anti-S. mutans STAMPs, AMPs, and/or other chimeric moieties can be used to reduce the incidence or severity of dental caries, inhibit plaque formation, reduce halitosis, and the like. Accordingly, in certain embodiments, such moieties are included in devices and formulations for dental applications e.g., tea or other drinks, toothpick coatings, dental floss coatings, toothpaste, gel, mouthwash, varnish, even professional dental products.

[0395] In certain embodiments, methods of treating or reducing the incidence, duration, or severity of periodontal disease are provided. The methods can include applying to the gingival crevice or periodontal pocket a composition comprising a targeting peptide, and/or antimicrobial peptide, and/or STAMP, and/or other chimeric moiety as described herein with a carrier/stabilizing agent. In the composition applied, the carrier/stabilizing agent can provide retention, tissue penetration, deposition and sustained release of the active agent (e.g., STAMP) for reducing the population of specific bacterial species within a periodontal biofilm and associated tissues. In certain embodiments, the carrier agent provides penetration and retention into the gingival crevice or periodontal pocket and associated tissues with sustained release of the active agent to enhance the reduction in population of select bacteria within the gingival tissue and dentinal tubule tissue.

[0396] In various embodiments, carrier agents can include, but are not limited to polylactide, polyglycolide, polylactide-co-glycolide, polycaprolactone, cellulosic-based polymers, ethylene glycol polymers and its copolymers, oxyethylene polymers, polyvinyl alcohol, chitosan and hyaluronan and its copolymers. In an aspect, the carrier agents include hydroxyethyl cellulose, hydroxypropyl cellulose, hydroxypropylmethyl cellulose, hydroxymethyl cellulose, polyvinyl alcohol, polyethylene glycol, polyethylene oxide, ethylene oxide-propylene oxide co-polymers, chitosan, hyaluronan and its copolymers, or combinations thereof. In another aspect, the carrier agents include hyaluronan or hyaluronic acid and copolymers including salts of hyaluronic acid, esters of hyaluronic acid, cross-linked gels of hyaluronic acid, enzymatic derivatives of hyaluronic acid, chemically modified derivatives of hyaluronic acid or combinations thereof. As used herein, hyaluronic acid broadly refers to naturally occurring, microbial and synthetic derivatives of acidic polysaccharides of various molecular weights constituted by residues of D-glucuronic acid polysaccharides and N-acetyl-D-glucosamine.

[0397] In certain embodiments, the active agent (e.g., STAMP, AMP, etc.) and the carrier agent are in the form of an admixture, in the form of a complex, covalently coupled, or a combination thereof. In certain embodiments, the carrier agent comprises a bioadhesive. Suitable bioadhesive carrier agents include, but are not limited to a cellulose based polymer and/or a dextrin. Suitable cellulose based polymers include, but are not limited to hydroxyethyl cellulose, hydroxypropyl cellulose, hydroxymethyl cellulose, or a mixture thereof. In one illustrative embodiment, the bioadhesive carrier agent includes polylactide, polyglycolide, polylactide-co-glycolide, polyethylene glycol, hyaluronan, hyaluronic acid, chitosan, or a mixture thereof. In certain embodiments the bioadhesive carrier agent can include a copolymer comprising polyethylene glycol, hyaluronan, hyaluronic acid, chitosan, or a mixture thereof

[0398] In certain embodiments, the carrier agent penetrates periodontal tissues. Suitable penetrating carrier agents include, but are not limited to hyaluronic acid, a hyaluronic acid derivative, chitosan, a chitosan derivative, or a mixture thereof. In an embodiment, the penetrating carrier agent includes a salt of hyaluronic acid, an ester of hyaluronic acid, an enzymatic derivative of hyaluronic acid, a cross-linked gel of hyaluronic acid, a chemically modified derivative of hyaluronic acid, or a mixture thereof.

[0399] V. Microorganism Detection.

[0400] As indicated above, the targeting moieties and/or STAMPs are useful in diagnostic compositions and methods to determine the presence or absence and/or to quantify the amount of one or microorganisms present in the environment, in a food stuff, in a biological sample, and the like.

[0401] For example, targeting peptide-antimicrobial peptide conjugates (e.g. Specifically targeted antimicrobial peptides (STAMPs)) can be used as diagnostic reagents. STAMPs (and other targeted antimicrobial constructs described herein) have the ability to specifically bind to microorganisms, for example, S. mutans, and permeabilize or disrupt their membrane such that cell impermeable dyes or other reagent (propidium iodide, etc.) may enter the microorganism or intracellular molecules or contents (ATP, DNA, Calcium, etc.) of the targeted microorganism are caused to be released into the environment for analysis. In one method a STAMP, for example, C16G2, can permeabilize or disrupt the membrane of target microorganisms, for example, S. mutans, in a prepared culture or clinical sample by itself, in a biofilm in vitro or in vivo. To the sample a cell impermeable dye (e.g. propidium iodide, etc.) is added to label and allow for detection of those microorganisms targeted by the STAMP. Cell permeable dyes (e.g. SYTO9) can also be added to label and detect the entire population of microorganisms in the sample. Labeled cells can then be quantified by fluorescence microscopy, fluorometry, flow cytometry or other method.

[0402] In another example, a STAMP treated sample is mixed with luciferase and luciferin which reacts with the ATP released from the STAMP treated cells and the resulting luminescence is used to detected and quantify targeted cells.

[0403] VI. Kits.

[0404] In another embodiment this invention provides kits for the inhibition of an infection and/or for the treatment and/or prevention of dental caries in a mammal. The kits typically comprise a container containing one or more of the active agents (i.e., the antimicrobial peptide(s) and/or chimeric construct(s)) described herein. In certain embodiments the active agent(s) can be provided in a unit dosage formulation (e.g., suppository, tablet, caplet, patch, etc.) and/or may be optionally combined with one or more pharmaceutically acceptable excipients.

[0405] In certain embodiments the kits comprise one or more of the home healthcare product formulations described herein (e.g., toothpaste, mouthwash, tooth whitening strips or solutions, contact lens storage, wetting, or cleaning solutions, dental floss, toothpicks, toothbrush bristles, oral sprays, oral lozenges, nasal sprays, aerosolizers for oral and/or nasal application, and the like).

[0406] In certain embodiments kits are provided for detecting and/or locating and/or quantifying certain target microorganisms and/or cells or tissues comprising certain target microorganisms, and/or prosthesis bearing certain target microorganisms, and/or biofilms comprising certain target microorganisms. In various embodiments these kits typically comprise a chimeric moiety comprising a targeting moiety and a detectable label as described herein and/or a targeting moiety attached to an affinity tag for use in a pretargeting strategy as described herein.

[0407] In addition, the kits optionally include labeling and/or instructional materials providing directions (i.e., protocols) for the practice of the methods or use of the “therapeutics” or “prophylactics” or detection reagents of this invention. Certain instructional materials describe the use of one or more active agent(s) of this invention to therapeutically or prophylactically to inhibit or prevent infection and/or to inhibit the formation of dental caries. The instructional materials may also, optionally, teach preferred dosages/therapeutic regiment, counter indications and the like.

[0408] While the instructional materials typically comprise written or printed materials they are not limited to such. Any medium capable of storing such instructions and communicating them to an end user is contemplated by this invention. Such media include, but are not limited to electronic storage media (e.g., magnetic discs, tapes, cartridges, chips), optical media (e.g., CD ROM), and the like. Such media may include addresses to internet sites that provide such instructional materials.

### EXAMPLES

[0409] The following examples are offered to illustrate, but not to limit the claimed invention.

### Example 1

### Design and Activity of a “Dual-Targeted” Antimicrobial Peptide

[0410] Numerous reports have indicated the important role of human normal flora in the prevention of microbial pathogenesis and disease. Evidence suggests that infections at mucosal surfaces result from the outgrowth of subpopulations or clusters within a microbial community, and are not linked to one pathogenic organism alone. In order to preserve the protective normal flora while treating the majority of infective bacteria in the community, a tunable therapeutic is necessary that can discriminate between benign bystanders and multiple pathogenic organisms. Here we describe the proof-of-principle for such a multi-targeted antimicrobial: a multiple-headed specifically-targeted antimicrobial peptide (MH-STAMP). The completed MH-STAMP, M8(KH)-20, displays specific activity against targeted organisms in vitro (Pseudomonas aeruginosa and Streptococcus mutans) and can remove both species from a mixed planktonic culture with little impact against untargeted bacteria. These results demonstrate that a functional, dual-targeted molecule can be constructed from wide-spectrum antimicrobial peptide precursor.

### Introduction

[0411] For nearly 30 years antimicrobial peptides (AMPs) have been rigorously investigated as alternatives to small molecule antibiotics and potential solutions to the growing crisis of antibiotic resistant bacterial infections (Ganz (2003) Nat Rev Immunol., 3: 710-720; Hancock and Lehrer (1998), 16: 82-88). Numerous reports have characterized potential AMPs from natural sources, and a great body of work has been carried out designing “tailor-made” AMPs due to the approachable nature of solid-phase peptide synthesis (SPPS) (Genco et al. (2003) Int J Antimicrob Agents, 21: 75-78; He and Eckert (2007) Antimicrob Agents Chemother., 51: 1351-1358). Several examples of the latter have shown remarkable activities in vitro against fungi, Gram-positive and Gram-negative bacteria, as well as some enveloped viruses (Brogden (2005) Nat Rev Microbiol. 3: 238-250).

[0412] Unlike small molecule antibiotics that may lose activity when their basic structures are modified even incrementally, peptides are a convenient canvas for molecular alteration. AMPs can be optimized through the incorporation of more or less hydrophobic or charged amino acids, which has been shown to affect selectivity for Gram-positive, Gram-negative or fungal membranes (Muhle and Tam JP (2001) Biochemistry, 40: 5777-5785; Tossi et al. (2000) Biopolymers 55: 4-30). Additionally, lysine residues can be utilized to improve AMP activity per μM. In this approach, multiple AMP chains can be attached to a single peptide scaffold through branching from lysine epsilon-amines (Tam et al. (2992) Eur. J. Biochem., 269: 923-932; Pini et al. (2005) Antimicrob Agents Chemother., 2005;49: 2665-2672). AMP activity can be specifically tuned through the attachment of a targeting peptide region, as described for a novel class of molecules, the specifically-targeted antimicrobial peptides, or STAMPs (Eckert et al. (2006) Antimicrob Agents Chemother., 50: 3651-3657; Eckert et al. (2006) Antimicrob Agents Chemother., 50: 1480-1488). These chimeric molecules can consist of functionally independent targeting and killing moieties within a linear peptide sequence. A pathogenic bacterium recognized (i.e. bound) by the targeting peptide can be eliminated from a multi-species community with little impact to bystander normal flora. As an extension of this concept, we hypothesized that a STAMP could be constructed with multiple targeting peptide “heads” attached to a single AMP by utilizing a central lysine residue branch point. Potentially, targeting “heads” could be specific for the same pathogen, or have different binding profiles. Utilizing the former approach, microbial resistance evolution linked to a targeting peptide could be inhibited or reduced, as no single microbial population would have the genetic diversity necessary to mutate multiple discrete targeting peptide receptors in one cell (Drake et al. (1998) Genetics 148: 1667-1686).

[0413] Multi-headed STAMP (MH-STAMP) molecules with differing bacterial targets may have appeal in treating poly-microbial infections, or where it may be advantageous to remove a cluster of biofilm constituents without utilizing several distinct molecules; for example in the simultaneously treatment of dental caries and periodontitis, or in the eradication of the Propionibacteria spp. and Staphylococcus spp. involved in acne and skin infections, respectively.

[0414] In this example, we present the proof-of-principle design, synthesis and in vitro activity of such a MH-STAMP, M8(KH)-20. Previously, we identified two functional STAMP targeting domains, one with specific recognition of the cariogenic pathogen S. mutans (Eckert et al. (2006) Antimicrob Agents Chemother., 50: 3651-3657), and the other with Pseudomonas spp.-level selectivity (Eckert et al. (2006) Antimicrob Agents Chemother., 50: 3833-3838). Conjoined to a normally wide-spectrum linear AMP, we observed antimicrobial effects directed specifically to P. aeruginosa and S. mutans in vitro. Additionally, treatment of mixed bacterial communities with the multi-headed MH-STAMP resulted in the specific eradication of the target organisms with little impact on bystander population levels.

### Materials and Methods

[0415] Bacterial Strains and Growth Conditions

[0416] P. aeruginosa ATCC 15692, Klebsiella pneumoniae KAY 2026 (Sprenger and Lengeler (1984) J Bacteriol., 157: 39-45), Escherichia coli DH5α (pFW5, spectinomycin resistance) (Podbielski et al. (1996) Gene, 177: 137-147), Staphylococcus aureus Newmann (Duthie and Lorenz (1952) J Gen Microbiol., 6: 95-107), and Staphylococcus epidermidis ATCC 35984 were cultivated under aerobic conditions at 37° C. with vigorous shaking. Aerobic Gram-negative organisms were grown in Lauri-Bertaini (LB) broth and Gram-positive bacteria in Brain-heart infusion (BHI) broth. Streptococcus mutans JM11 (spectinomycin resistant, UA140 background) was grown in Todd-Hewitt (TH) broth under anaerobic conditions (80% N2, 15% CO₂, 5% H2) at 37° C. Merritt et al. (2005) J Microbiol Meth., 61: 161-170. All bacteria were grown overnight to an OD600 of 0.8-1.0 prior to appropriate dilution and antimicrobial testing.

[0417] Synthesis of Multi-Head STAMP Peptides

[0418] Conventional solid-phase peptide synthesis (SPPS) methodologies were utilized for the construction of all peptides shown in FIG. 15 (Symphony Synthesizer, PTI, Tucson, Ariz.). Chemicals, amino acids, and synthesis resins were purchased from Anaspec (San Jose, Calif.). BD2.20 (FIRKFLKKWLL (SEQ ID NO:3226), amidated c-terminus, mw 1491.92), an antimicrobial peptide developed in our laboratory with robust antimicrobial activity against a number of bacterial species (Table 19), served as the root sequence to which differing targeting peptides were attached: Firstly, BD2.20 was synthesized by SPPS (Rink-Amide-MBHA resin, 0.015 mmol), followed by the stepwise coupling of a functionalized alkane (NH₂(CH₂)₇COOH), and an Fmoc-protected Lys (side-chain protected with 4-methyltrityl (Mtt)) to the N-terminus. Standard SPPS methods were then employed for the step-wise addition of the S. mutans targeting peptide M8 plus a tri-Gly linker region (TFFRFLNR-GGG (SEQ ID NO:3227)) to the N-terminal of the central Lys. After assembly of Fmoc-M8-GGG-K(Mtt)-(CH₂)₇CO-BD2.20 (SEQ ID NO:3228), the Fmoc group was removed with 25% piperidine in DMF and the N-terminal was re-protected with an acetyl group with Ac₂O/DIEA (1:1, 20 molar excess) for 2 hours. The Mtt-protected amino group of the central Lys was then selectively exposed with 2% TFA in DCM (1.5 mL) for 15 minutes (three cycles of 5 min). The resulting product was reloaded into the synthesizer and the peptide sequence built from the Lys side-chain was completed with standard Fmoc SPPS methods. As shown in FIG. 15, the completed MH-STAMP M8(KH)-20 contained the side-chain peptide KH (Pseudomonas spp.-targeting, KKHRKHRKHRKH-GGG (SEQ ID NO:3229)), while in MH-STAMP M8(BL)-20 a peptide with no bacterial binding (data not shown), BL-1 (DAANEA-GGG), was utilized. BL(KH)-20 was constructed identically to M8(KH)-20, utilizing BL-1 in place of M8 (FIG. 15).

TABLE 19
MICs of MH-STAMPs and component peptides.

| | MIC (μM) | | | | | |
|---|---|---|---|---|---|---|
| | P. aeruginosa | E. coli | K. pneumoniae | S. mutans | S. epidermidis | S. aureus |
| BD2.20 | 14.4 ± 4.40 | 5.47 ± 1.41 | 2.98 ± 0.47 | 2.86 ± 0.60 | 5.11 ± 1.58 | 5.625 ± 1.29 |
| M8(KH)- | 11.95 ± 3.32 | 2.72 ± 0.59 | 3.13 | 6.25 | 3.13 | 5.64 ± 1.07 |
| 20 | | | | | | |
| M8(BL)- | 50 | 5.97 ± 0.94 | 6.88 ± 1.98 | 6.25 | 6.25 | 18.05 ± 6.58 |
| 20 | | | | | | |
| BL(KH)- | 27.5 ± 7.90 | 6.25 | 6.25 | 6.25 | 6.25 | 6.25 |
| 20 | | | | | | |

Average MIC with standard deviation, n = 10 assays.

[0419] Synthesis progression was monitored by the ninhydrin test, and completed peptides cleaved from the resin with 95% TFA utilizing appropriate scavengers, and precipitated in methyl tert-butyl ether. Purification and MH-STAMP quality was confirmed by HPLC (Waters, Milford, Mass.) using a linear gradient of increasing mobile phase (acetonitrile 10 to 90% in water with 0.1% TFA) and a Waters XBridge BEH 130 C18 column (4.6×100 mm, particle size 5 μm). Absorbance at 215 nm was utilized as the monitoring wavelength, though 260 and 280 nm were also collected. LC spectra were analyzed with MassLynx Software v.4.1 (Waters). Matrix-assisted laser desorption ionization (MALDI) mass spectroscopy was utilized to confirm correct peptide mass (Voyager System 4291, Applied Biosystems) (Anderson et al. (2008) Biotechnol Lett., 30: 813-818).

[0420] MIC Assay

[0421] Peptides were evaluated for basic antimicrobial activity by broth microdilution, as described previously (Eckert et al. (2006) Antimicrob Agents Chemother., 50: 3651-3657; Eckert et al. (2006) Antimicrob Agents Chemother., 50: 1480-1488). Briefly, ˜1×105 cfu/mL bacteria were diluted in TH (S. mutans), or Mueller-Hinton (MH) broth (all other organisms) and distributed to 96-well plates. Serially-diluted (2-fold) peptides were then added and the plates incubated at 37° C. for 18-24 h. Peptide MIC was determined as the concentration of peptide that completely inhibited organism growth when examined by eye (clear well). All experiments were conducted 10 times.

[0422] Post-Antibiotic Effect Assay

[0423] The activity and selectivity of MH-STAMPs after a 10 min incubation was determined by growth retardation experiments against targeted and untargeted bacteria in monocultures, as described previously (Id.). Cells from overnight cultures were diluted to ˜5×106 cfu/mL in MH (or TH with 1% sucrose for S. mutans), normalized by OD600 0.05-0.1 and seeded to 96-well plates. Cultures were then grown under the appropriate conditions for 2 h (3 h for S. mutans) prior to the addition of peptides for 10 min. Plates were then centrifuged at 3000×g for 5 min, the supernatants discarded, fresh medium returned (MH or TH without sucrose for S. mutans), and incubation resumed. Bacterial growth after treatment was then monitored over time by OD600.

[0424] Microbial Population Shift Assay

[0425] Mixed planktonic populations of P. aeruginosa, E. coli, S. epidermidis, and S. mutans were utilized to examine the potential of MH-STAMPs to direct species composition within a culture after treatment. Samples were prepared containing: ˜6×10⁴ cfu/mL S. mutans, ˜2×10⁴ cfu/mL E. coli, ˜2×104 cfu/mL S. epidermidis, and ˜0.5×10⁴ cfu/mL P. aeruginosa in BHI (mixed immediately before peptide addition). Peptide (10 μM) or mock-treatment (1× PBS) was then added and samples were incubated at 37° C. for 24 h under anaerobic conditions (80% N₂, 15% CO₂, 5% H₂). After incubation, samples were serially diluted (1:10) in 1× PBS and aliquots from each dilution were then spotted to agar plates selective for each species in the mixture: TH plus 800 μg/mL spectinomycin (S. mutans), LB plus 25 μg/mL ampicillin (P. aeruginosa), LB plus 200 μg/mL spectinomycin (E. coli), and mannitol salt agar (MSA, S. epidermidis) in order to quantitate survivors from each species. Plates were then incubated 37° C. under aerobic conditions (TH plates were incubated anaerobically) and colonies counted after 24 h to determine survivors. Expected colony morphologies were observed for each species when plated on selective media. Gram stains and direct microscopic observation (from select isolated colonies) were undertaken to confirm species identity (data not shown). The detection limit of the assay was 200 cfu/mL.

### Results

[0426] Design and Synthesis of Multi-Headed STAMPs

[0427] We constructed a prototype MH-STAMP from the well-established targeting peptides KH (specific to Pseudomonas spp) and M8 (specific for Streptococcus mutans). The wide-spectrum antimicrobial peptide BD2.20 was utilized as the base AMP for all MH171 STAMP construction. BD2.20 is a novel synthetic AMP with a cationic and amphipathic residue arrangement, which has robust MICs against a variety of Gram-negative and Gram-positive organisms (Table 19). For the synthesis of MH-STMAP M8(KH)-20 (construct presented in FIG. 15), BD2.20 and a Lys (Mtt-protected side-chain) residue were joined via an activated alkane spacer, followed by addition of the M8 targeting peptide to the N-terminus of the product. Selective deprotection of the central Lys(Mtt) side chain was then undertaken and the KH targeting peptide attached. The correct molecular mass (4888.79) and ˜90% purity was confirmed by HPLC and MALDI mass spectrometry (FIG. 16).

[0428] The non-binding “blank” targeting peptide BL-1 was incorporated into the synthesis scheme in place of KH or M8 to construct variant MH-STAMPs possessing a single functional targeting head: M8(BL)-20 and BL(KH)-20. The correct MW and acceptable purity were observed for these MH-STAMPs (FIG. 15, data not shown).

[0429] General Antimicrobial Activity of Multi-Head Constructs

[0430] After synthesis, the completed MH-STAMPs were evaluated for general antimicrobial activity by MIC against a panel of bacteria. As shown in Table 19, the MH-STAMP constructs M8(KH)-20, BL(KH)-20, and M8(BL)-20 were found to have similar activity profiles to that of BD2.20 for the organisms examined (less than two titration steps in 10-fold difference). Additionally, we observed a difference in general susceptibility between P. aeruginosa and the other organisms tested, suggesting this bacterium is more resistant to BD2.20. Overall, these data indicate that the addition of the targeting domains to the base sequence was tolerated and did not completely inhibit the activity of the antimicrobial peptide.

[0431] Peptide selectivity could not be determined utilizing these methods, as STAMPs and their parent AMP molecules often display similar MICs, but have radically different antimicrobial kinetics and selectivity due to increased specific-killing mediated by the targeting regions (Id.). Therefore, we performed different experiments to test for antimicrobial selectivity and functional MH-STAMP construction.

[0432] Selectivity and Post-Antibiotic Effect of MH-STAMP Constructs

[0433] MH-STAMP antimicrobial kinetics was ascertained utilizing a variation of the classical post-antibiotic effect assay, which measures the ability of an agent to affect an organism's growth after a short exposure period. Monocultures of MH-STAMP-targeted and untargeted organisms were exposed to M8(KH)-20, M8(BL)-20, BL(KH)-20, or unmodified BD2.20, then allowed to recover. As shown in FIG. 17A, S. mutans growth was effectively retarded by M8-containing constructs (M8(KH)-20, M8(BL)-20), but was not altered by a MH-STAMP construct lacking this region (BL(KH)-20). Similarly, the growth of the other targeted bacterium, P. aeruginosa, was inhibited in a KH-dependant manner (FIG. 17B). In comparison, the non-targeted bacteria E. coli, S. aureus, and S. epidermidis were not inhibited by treatment with any MH-STAMP and were only inhibited by the base antimicrobial peptide BD2.20, which displayed robust antimicrobial activity against all examined strains. These results indicate that MH-STAMPs containing KH or M8 targeting domains have activity against P. aeruginosa or S. mutans, respectively, and not other bacteria. Furthermore, replacement of the targeting region with a non-binding peptide abolishes specific activity.

[0434] Ability of MH-STAMPs to Direct a “Population Shift” Within a Mixed Species Population

[0435] We hypothesized that potential MH-STAMP dual-functionality could affect a particular set of bacteria within a mixed population, thereby promoting the outgrowth of non-targeted organisms and “shifting” the constituent makeup. To examine this possibility, defined mixed populations of planktonic cells were treated continuously and the make-up of the community examined after 24 h. As shown in FIG. 18, treatment with the wide spectrum AMP BD2.20 resulted in a significant loss of recoverable cfu/mL after 24 h from all species in the mixture. Treatment with M8(KH)-20 was found to alter this pattern; we observed ˜1×10⁵ cfu/mL surviving E. coli and S. epidermidis, but did not recover S. mutans or P. aeruginosa cfu/mL. In BL(KH)-20 treated samples, P. aeruginosa cfu/mL were not observed, though we recovered higher than input cfu/mL from S. mutans and unchanged numbers of S. epidermidis and E. coli. In samples exposed to M8(BL)-20, S. mutans recoverable cfu/mL were greatly reduced compared to input cfu/mL, while other species were not affected or affected to a lesser extent. Interestingly, these results suggest that M8(KH)-20, M8(BL)-20, and BL(KH)-20 retain their ability to affect organisms recognized by the targeting regions present, even within a mixed population of bacteria.

### Discussion

[0436] Our results indicate that we have successfully constructed a STAMP with dual antimicrobial specificities controlled by the targeting peptides present in the molecule; KH for Pseudomonas spp, M8 for S. mutans. In a closed multi-species system (FIG. 18), the dual specificity of M8(KH)-20 was readily discernable: the population of the culture “shifted” away from targeted organisms after MH-STAMP treatment. The targeted bacteria were eliminated and the population of untargeted organisms increased, to varying degrees, above-input cfu/mL. Additionally, interruption of KH or M8 in the MH-STAMP construct with the non-binding peptide BL-1 resulted in the expected elimination of only one targeted species. These results support the hypothesis that functional MH-STAMPs could be constructed from a wide-spectrum AMP base.

[0437] The emergence of metagenomics and the development of more sensitive molecular diagnostics has driven an increase in the understanding of human-associated microbial ecologies and host-microbe interactions (Aas et al. (2005) J Clin Microbiol., 43: 5721-5732; Boman (2000) Immunol Rev., 173: 5-16; Kreth et al. (2005) J Bacteriol., 187: 7193-7203). At mucosal surfaces, it has become clear that our bodies harbor an abundance of residential flora which may impact innate and humoral immunity, nutrient availability, protection against pathogens, and even host physiology (Metges (2000) J Nutr., 130: 1857S-64; Sears (2005) Anaerobe, 11: 247-251; Lievin-Le et al. (2006) Clin Microbiol Rev., 19: 315-337; DiBaise et al. (2008) Mayo Clinic Proceedings 83: 460-469). Furthermore, findings have indicated that shifts in the diversity of normal flora are associated with negative clinical consequences; for example the overgrowth of S. mutans in the oral cavity during cariogenesis (linked to the uptake of sucrose) or the antibiotic-assisted colonization of the intestine by Clostridium difficle (Loesche (1986) Microbiol Rev., 50: 353-380; Gould and McDonald (2998) Crit Care 12: 203). Other population shifts may be linked to axilla odor (Corynebacteria spp) (Leyden et al. (1981) J Invest Dermatol., 77: 413-416; Elsner (2006) Curr Probl Dermatol., 33: 35-41), or even host obesity. Given the quantity and diversity of microbes present, pathogenesis at mucosal surfaces is not likely to be associated with the overgrowth of a single strain or species. More often, it is a population shift resulting in the predominance of two or more species; for example the persistence of Burkholderia cepacia and P. aeruginosa in cystic fibrosis airway or Treponema denticola and Porphymonas gingivalis and other “red cluster” organisms in gingivitis (Govan and Deretic (1996) Microbiol Rev., 60: 539-574; Paster et al. (2001) J Bacteriol., 183: 3770-3783). In many cases (such as the latter) these species may have only distant phylogenetic relationships and display differential susceptibilities to antibiotic therapies resulting in persistent disease progression despite treatment (Schlessinger (1988) Clin Microbiol Rev., 1: 54-59; Tresse et al. (1997) J Antimicrob Chemother., 40: 419-421). Currently, available treatments for infections of mucosal surfaces are largely non-specific (traditional small-molecule antibiotics, mechanical removal), and thus are not effective in retaining flora or shifting the constituent balance back to a health-associated composition (Keene and Shklair (1974) J Dent Res., 53: 1295). There is a need for a therapeutic treatment that can selectively target multiple pathogens, regardless of their phylogenetic relationship, and MH-STAMPs can help achieve this goal.

[0438] In monoculture experiments (FIG. 17), our results suggest that M8 or KH inclusion in the MH-STAMP drove activity towards S. mutans or P. aeruginosa, but also that the presence of a targeting domain reduced the activity of the parent AMP BD2.20 against untargeted organisms. In contrast, the results of our MIC assays (Table 19) indicate little difference in activity between BD2.20 and any MH-STAMP. Against untargeted organisms, the M8 and KH regions are likely to have a negative, but not completely inhibitory, impact on BD2.20 activity. Given the long duration of activity and the lower inoculum size in the MIC assay (compared with experiments in FIG. 17), it is likely that all BD2.20-containing peptides could reach equal levels of growth inhibition, despite large and target-specific differences in antimicrobial speed. This pattern of results was also observed when comparing MICs of targeted and untargeted organisms utilizing STAMPs against S. mutans and Pseudomonas mendocina (Eckert et al. (2006) Antimicrob Agents Chemother., 50: 3651-3657; Eckert et al. (2006) Antimicrob Agents Chemother., 50: 1480-1488).

[0439] Although more rigorous studies and a more medically relevant combination of pathogen targets is desirable, these findings indicate that it is possible to design an antimicrobial peptide-based therapeutic with multiple and defined fidelities in vitro. MH-STAMPs may help improve human health through the promotion of healthy microbial constituencies.

### Example 2

### Synthesis of Peptide-Porphyrin Conjugate:

[0440] The mixture of coupling reagent HATU (5 eq. excess, 10 mg) and purpurin-18 (MW 564, 5 eq excess, 15 mg) in 600 mL dry dichloromethane (DCM):DMF:dimethylsulphoxide (DMSO) (1:1:1 (v/v)) was added to the peptide resin (1 molar equivalent, 15 mg) which was swelled by placing in minimal DMF for 30 min prior to reaction. 26 μL (10 molar equivalents) DIPEA was then added to the reaction flask to initiate the reaction. The reaction mixture was protected with argon and stirred at room temperature for 3 h.

[0441] After finishing, the reaction mixture was then passed down a sintered glass filtered vial and extensively washed with DMF and DCM to remove all waste reagents. The resin was then dried overnight in vacuum, and cleaved with 1 ml of trifluoroacetic acid (TFA)/thioanisole/water/EDT (10/0.5/0.5/025) for 2 hr at room temperature, and the cleavage solution was precipitated with 10 mL methyl-tert butyl ether. The precipitate was washed twice with the same amount of ether.

### Example 3

### Synthesis of Peptide-CSA Conjugate:

[0442] To the fully protected peptide (solution of B43-GGG (FIDSFIRSF-GGG, 0.025 mmol) and tri-Boc-CSA-15 (0.0125 mol) in 300 μL DMF, DCC (7.7 mg), HOBt (5.1 mg) and 13 μL DIEA were added in iced-bath. After stirred at room temperature for four days, the reaction mixture was poured into 5 ml water and extracted with chloroform (5×3 mL). The CHCl₃ extract was evaporated under vacuum and dried in a lyophilizer overnight. The dried CHCl₃ extracts was then dissolved in 1 mL DCM followed by added 1 mL of TFA in iced-bath. The reaction mixture was further stirred at room temperature for 2 hours and precipitated with methyl tert-butyl ether (10 mL). The precipitate was further washed once with the same amount ether and dried in vacuum.

### Example 4

### STAMPs Against Corynebacterium jeikeium and Streptococcus mutans

[0443] This example illustrates the development of STAMPs to selectively target and reduce or eliminate Streptococcus mutans (dental caries) or Corynebacterium jeikeium (body odor, opportunistic infections) from mixed microbial populations.

[0444] Axilla odor is caused by overgrowth of, and metabolite production from, Corynebacterium spp, which replaces Staphylococcus and Micrococcus spp associated with less odor. Current hygiene (soaps, antibiotics, antiseptics, disinfectants) practices remove all bacteria, allowing the ratio of Corynebacteria to normal flora to remain high during regrowth. Deodorants and anti-perspirants are temporary solutions that hide or even exacerbate the problem.

[0445] S. mutans is the major etiological agent of dental caries. Current methods (tooth brushing, antiseptic mouthrinses) to treat cariogenesis have focused on complete bacterial removal, i.e., elimination of S. mutans and other harmless oral bacteria. Caries have persisted despite these methods, and in many cases, S. mutans can become the dominant organism in the mouth. Several S. mutans and acid-targeted approaches (probiotic replacement, saliva pH adjustment) are under development, but none have shown clinical efficacy.

[0446] This example describes a number of STAMPs that preferentially or selectively reduce or eliminate S mutans and/or Corynebacterium spp from mixed populations.

[0447] Several lead STAMPs with specific activity against Corynebacterium jeikeium are also disclosed herein.

[0448] The STAMPs described herein comprise functional regions within a peptide molecule or a chemical conjugate. These regions include a targeting region comprising one or more targeting moieties (e.g., targeting peptides), a linker, and one or more killing moieties (e.g., antimicrobial peptides (AMPs), porphyrins, etc.).

[0449] The STAMPs function through the targeting region, which selectively accumulates STAMPs, and therefore killing regions, on or in proximity to the microorganism of interest. Other flora are not recognized by the targeting region, and therefore avoid or have reduced STAMP accumulation and cellular damage.

[0450] In certain embodiments, STAMPs against oral S. mutans are best applied formulated in a mouthrinse, toothpaste, cream, gel, or adhesive strip, and in certain preferably embodiments, are provided in a formulation that comprises 0.5 to 2.5× PBS (or other salt) and other ingredients commonly found in oral healthcare formulations (e.g., mouthrinse formulations). Certain illustrative formulations are shown in Table 20.

[0451] During the course of evaluating STAMPs, antimicrobial peptides (AMPs), and binding peptides for desired activity, it was discovered that certain formulations can attenuate or promote peptide activity, as compared to activity levels in a default buffer system (1× PBS). In some cases, 1× PBS may provide the best level of activity. Below are a number of formulations that alter, or may alter, peptide or STAMP activity. For complex buffer systems, assume the base solvent is water unless otherwise stated.

[0452] Formulation 1 (1× PBS, pH 7.4): 136.8 mM NaC1, 2.68 mM KC1, 1.01 mM Na₂HPO₄, and 1.37 mM KH₂PO₄.

[0453] Formulation 2 (HEPES/CTAB): 20 mM HEPES (4-(2-hydroxyethyl)-1-piperazineethanesulfonic acid), 150 mM NaC1, 1 mM MgCl₂, and 0.1% CTAB (Cetyl trimethylammonium bromide).

[0454] Formulation 3 (TRIS/CTAB): 20 mM Tris (tris(hydroxymethyl)aminomethane), pH 7.5, 150 mM NaCl, 1 mM MgCl₂, and 0.1% CTAB.

[0455] Formulation 4: 20 mM HEPES.

[0456] Formulation 5: 20 mM Tris, pH 7.5.

[0457] Formulation 6: 0.2% CTAB.

[0458] Formulation 7: 1% Glycerol.

[0459] Formulation 8: 1% Pluronic F108 (nonionic surfactant: α-Hydro-.omega.-hydroxypoly(oxyethylene)poly(oxypropylene)poly(oxyethylene) block copolymer).

[0460] Formulation 9: 1% Pluronic F123 (Poly(ethylene glycol)-block-poly(propylene glycol)-block-poly(ethylene glycol), average Mₙ ˜5,800).

[0461] Formulation 10: 1% Pluronic F17R4 (Poly(propylene glycol)-block-poly(ethylene glycol)-block-polypropylene glycol), average Mₙ ˜2,700).

[0462] Formulation 11: 1% to 7% PEG400.

[0463] Formulation 12: 50 mM Urea.

[0464] Formulation 13: 10 mM AOT (Sodium bis(2-ethylhexyl) sulfosuccinate).

[0465] Formulation 14: 0.5-0.1% Tween 20 (nonionic detergent, also known as polysorbate 20 or PEG(20)sorbitan monolauratesorbitan monolaurate).

[0466] Formulation 15: 0.5-0.1% Tween 80 (nonionic surfactant, C₆₄H₁₂₄O₂₆, also known as polyoxyethylene (20) sorbitan monooleate, (x)-sorbitan mono-9-octadecenoate poly(oxy-1,2-ethanediyl), or POE (20) sorbitan monooleate).

[0467] Formulation 16: 5-10% Ethanol.

[0468] Formulation 17: 20% Glycerin.

[0469] Formulation 18: 20% Sorbitol.

[0470] Formulation 19: 10% Glycerin/10% Sorbitol.

[0471] Formulation 20: 0.1% SLS (Sodium lauryl sulfate).

[0472] Formulation 21: 1% Pluronic F127 (nonionic suffactant: α-Hydro-.omega.-hydroxypoly(oxyethylene)poly(oxypropylene)poly(oxyethylene) block copolymer).

[0473] Formulation 21: 0.1% Tween 20 (nonionic detergent, also known as Polysorbate 20, or PEG(20)sorbitan monolaurate).

[0474] Formulation 21: 10% PG (phospholipid gel).

[0475] Mouthrinse neat solution #1 (made in 1× PBS): 7% ETOH, 20% Glycerin, 7% PEG 400, and 1% PLURONIC® F127.

[0476] Mouthrinse neat solution #2 (made in 1× PBS): 7% ETOH, 20% Sorbitol, 7% PEG 400, and 1% PLURONIC® F127.

[0477] Mouthrinse neat solution #3 (made in 1× PBS): 7% ETOH, 20% Glycerin and 7% PEG 400.

[0478] Mouthrinse neat solution #4 (made in 1× PBS): 7% ETOH, 20% Sorbitol and 7% PEG 400.

[0479] Other illustrative, but not limiting, mouthrinse formulations are shown in Table 20.

TABLE 20
Illustrative mouthrinse formulations.

| Rinse# | ETOH | Glycerin | PEG400 | F127 | Water¹ | Fluoride |
|---|---|---|---|---|---|---|
| 1 | 5 | 22.5 | 7 | 1 | 64.5 | 187.5 |
| 2 | 6 | 25 | 1 | 0 | 68 | 0 |
| 3 | 6 | 20 | 7 | 0 | 67 | 0 |
| 4 | 6 | 20 | 1 | 1 | 72 | 0 |
| 5 | 7 | 25 | 7 | 0 | 61 | 0 |
| 6 | 7 | 20 | 1 | 0 | 72 | 0 |
| 7 | 7 | 20 | 7 | 0 | 66 | 250 |
| 8 | 5 | 20 | 7 | 1 | 67 | 0 |
| 9 | 6.472 | 21.139 | 5.361 | 0.722 | 66.306 | 250 |
| 10 | 7 | 22.5 | 1 | 0 | 69.5 | 250 |
| 11 | 5 | 25 | 1 | 0 | 69 | 250 |
| 12 | 7 | 20 | 7 | 0 | 66 | 250 |
| 13 | 5 | 20 | 1 | 1 | 73 | 250 |
| 14 | 5 | 25 | 7 | 0.5 | 62.5 | 250 |
| 15 | 7 | 25 | 1 | 0.5 | 66.5 | 250 |
| 16 | 7 | 25 | 7 | 1 | 60 | 250 |
| 17 | 5 | 25 | 7 | 0.5 | 62.5 | 0 |
| 18 | 7 | 20 | 1 | 1 | 71 | 250 |
| 19 | 6 | 25 | 1 | 1 | 67 | 250 |
| 20 | 7 | 25 | 7 | 1 | 60 | 125 |
| 21 | 5 | 25 | 1 | 0 | 69 | 250 |
| 22 | 5 | 20 | 1.5 | 0.5 | 73 | 0 |
| 23 | 7 | 20 | 1 | 1 | 71 | 250 |
| 24 | 6 | 20 | 1 | 0 | 73 | 250 |
| 25 | 5 | 22.333 | 3.778 | 0.444 | 68.444 | 125 |
| 26 | 7 | 25 | 1 | 1 | 66 | 0 |
| 27 | 6 | 25 | 7 | 0 | 62 | 250 |
| 28 | 7 | 20 | 7 | 1 | 65 | 0 |
| 29 | 7 | 25 | 4 | 1 | 63 | 62.5 |
| 30 | 5 | 25 | 4 | 0 | 66 | 0 |
| 31 | 5 | 25 | 1 | 1 | 68 | 0 |
| 32 | 7 | 25 | 7 | 1 | 60 | 0 |
| 33 | 7 | 22.5 | 4 | 0.5 | 66 | 0 |
| 34 | 5 | 20 | 4.5 | 0 | 70.5 | 250 |
| 35 | 5 | 23 | 1 | 0 | 71 | 62.5 |
| 36 | 6 | 20 | 1 | 1 | 72 | 0 |
| 37 | 5 | 20 | 7 | 1 | 67 | 250 |
| 38 | 7 | 20 | 1 | 0 | 72 | 0 |
| 39 | 5 | 25 | 4 | 1 | 65 | 250 |
| 40 | 5 | 22.5 | 7 | 0 | 65.5 | 0 |
| n1 | 7 | 20 | 7 | 1 | 65 | 0 |
| n2 | 7 | 20% | 7 | 1 | 65 | 0 |
| | | Sorbitol | | | | |
| n3 | 7 | 20 | 7 | 0 | 66 | 0 |
| n4 | 7 | 20% | 7 | 0 | 66 | 0 |
| | | Sorbitol | | | | |

¹1xPBS can be substituted for water

[0480] In certain embodiments, Corynebacterium-specific STAMPs are formulated in any number of creams, nanoemulsions, lipid micelles, aqueous or no-aqueous gels, sprays, soaps or roll-on bars, or other products used for axilla or other hygiene.

[0481] STAMP-mediated selective antimicrobial activity can result in preservation of the normal flora at the oral or axilla mucosal surface, resulting in protective colonization and the conversion of a harmful flora to a beneficial one. Recurrence of pathogen overgrowth would be reduced, which also limits the amount and frequency (and therefore cost) of STAMP delivery. STAMPs allow for “surgical” antimicrobial precision, which limits antimicrobial resistance evolution as well due to the general mechanism of cell membrane damage mediated by the killing region.

[0482] A number of anti-S. mutans STAMPs (see Table 21) and anti-C. jeikeium STAMPs have been designed and tested, some in formulations. All show potent selective activity against their bacterial targets in vitro, including against biofilm forms. When tested, STAMPs have little cytotoxicity against cell lines in vitro.

TABLE 21
Illustrative anti-S. mutans STAMPs.

| | | SEQ |
|---|---|---|
| STAMP | Amino Acid Sequence | ID NO |
| 2_1G2 | FIKHFIHRFGGGKNLRIIRKGIHIIKKY* | 3230 |
| C16AF5 | TFFRLFNRSFTQALGKGGGFLKFLKKFFKKLKY* | 3231 |
| 1845L621 | KFINGVLSQFVLERKPYPKLFKFLRKHLL* | 3232 |
| 1903-21 | NIFEYFLEGGGKLFKFLRKHLL* | 3233 |

Single underline is binding peptide.
Double underline is antimicrobial peptide (AMP).
No underline is linker.
*indicates optionally protected (e.g., amidated) C terminal.

TABLE 22
Illustrative anti-C. jeikeium STAMPs.

| STAMP | Amino Acid Sequence | SEQ ID NO |
|---|---|---|
| 2038L6CAM135 | GKAKPYQVRQVLRAVDKLETRRKKGGR | 3234 |
| | PYPGWRLIKKILRVFKGL* | |
| 1619- | SKRGRKRKDRRKKKANHGKRPNSGGG | 3235 |
| CAM135 | GWRLIKKILRVFKGL* | |
| 1599-BD2.16 | YSKTLHFADGGGKILKFLFKKVF* | 3236 |
| 1619-BD2.16 | SKRGRKRKDRRKKKANHGKRPNSGGG | 3237 |
| | KILKFLFKKVF* | |
| 1904-BD2.16 | GSVIKKRRKRMSKKKHRKMLRRTRVQR | 3238 |
| | RKLGKGGGKILKFLFKKVF* | |

Single underline is binding peptide.
Double underline is antimicrobial peptide (AMP).
No underline is linker.
*indicates optionally protected (e.g., amidated) C terminal.

[0483] It was a surprising discovery that certain anti-S. mutans STAMPs required a salt in the formulation (e.g., PBS) for optimum activity. Thus, for example, the anti-S. mutans STAMP C16G2 (TFFRLFNRSFTQALGKGGGKNLRIIRKGIHIIKKY*, SEQ ID NO:2) comprising the TFFRLFNRSFTQALGK (SEQ ID NO:1) attached to the antimicrobial peptide (AMP) KNLRIIRKGIHIIKKY (SEQ ID NO: 3080) by a peptide linker (GGG) was substantially inactive in water-based salt-free buffers and nanoemulsions, but was active in a phosphate buffered saline (PBS) formulation. Suitable PBS formulations ranged from 0.5× PBS to about 2.5× PBS with an activity optimum at about 1× PBS. Similar results are believed to obtain for other anti-S. mutans STAMPS as well as a number of other STAMPs. In certain embodiments STAMP stability in solution was improved by inclusion of fluoride in mouthrinse.

### Example 5

### Photodynamic Therapy Targeted Against Streptococcus mutans

[0484] Dental caries (tooth decay) is one of the most prevalent and costly infectious diseases in the United States. Currently, the annual expenditures on dental services exceed $85 billion, with the majority of these costs attributable to dental caries and its sequelae (www.ada.org/). The oral cavity harbors a complex microbial community consisting of over 600 different non-harmful/commensal microbial species together with a limited number of pathogenic bacteria, including the major etiological agent of dental caries, Streptococcus mutans. Once established, S. mutans generates acid during the fermentation of dietary sugars, which causes the demineralization of tooth structure and inhibits the growth of non-pathogenic commensal bacteria within the same microbial niche. Despite diligent use of broad-spectrum antimicrobial compounds and tooth brushing, S. mutans persists within the oral cavity and causes repeated cycles of cariogenesis. Current “remove all, kill-all” approaches have shown limited efficacy, since a “cleaned” tooth surface provides an equal opportunity for commensal as well as pathogenic bacteria to re-colonize in the non-sterile environment of the oral cavity. To address this shortcoming, we have constructed and evaluated a light-activated S. mutans-selective antimicrobial agent. C16-RB, constructed via conjugation of the S. mutans competence-stimulating peptide to the photodynamic dye rose bengal, displays robust anti-S. mutans activity in vitro under blue exposure from a handheld dental curing light. C16-RB has reduced activity against other oral streptococci under mixed biofilm conditions and has limited cytotoxicity in vitro.

[0485] To develop a method of selectively eliminating S. mutans from a dental biofilm so that beneficial species exert a protective colonization effect and long-term protection from S. mutans re-colonization can be attained we created a novel class of targeted antimicrobials, known as specifically-targeted antimicrobial peptides, or STAMPs. STAMPs consist of functionally independent, yet conjoined, domains within a linear peptide sequence; a targeting region and an antimicrobial region. The targeting region, which binds specifically to a bacterial species of interest, delivers the killing portion of the molecule that consists of a normally wide-spectrum antimicrobial peptide. Previously, we successfully designed STAMPs against S. mutans by taking advantage of the competence stimulating pheromone (CSP) peptide produced by this organism that has demonstrated S. mutans-specific recognition. STAMPs synthesized with portions of CSP as targeting domains were capable of specific antimicrobial activity against S. mutans, and not other oral streptococci or non-cariogenic organisms in biofilms.

[0486] We hypothesized that targeted killing might be achieved through the use of non-peptide antimicrobial molecules, such as porphyrins or dyes utilized in PDT. Here we present the proof-of-principle construction and in vitro efficacy of the targeted, peptide-guided, photodynamic molecule C16-RB. C16-RB displays S. mutans selective antimicrobial activity upon blue light activation with limited activity against non-cariogenic oral streptococci and epithelial cells.

### Materials and Methods

[0487] Synthesis of C16-RB

[0488] All amino acids, synthesis resins and reagents were peptide synthesis grade (Anaspec, San Jose, Calif.; Fisher Scientific). To construct our C16-RB conjugate, conventional 9-fluorenylmethoxy carbonyl (Fmoc) solid-phase methodology was employed to synthesize the CSP_{C16} peptide and attach the succinate and PEG linkers, utilizing double coupling cycles in N-hdroxybenzotrazole, HBTU (O-benzotriazole-N,N,N,N-tetramethyl-uronium hexafluoro-phosphate) and diisopropyl ethylamine (DIEA), with dimethylformamide (DMF) and N-methylpyrrolidone (NMP) as solvents, as described previously. The peptide resin (1 molar equivalent, 15 mg) was then swollen in DMF for 30 min prior to attachment of the PEG terminal amide group to the carboxyl lactone in RB (FIG. 19B). This reaction was carried out in a mixture of 2-(7-Aza-1H-benzotriazole-1-yl)-1,1,3,3-tetramethyluronium hexafluorophosphate (HATU, 5-molar excess) in dichloromethane (DCM):DMF:dimethylsulphoxide (DMSO) (1:1:1 (v/v)). Ten molar equivalents of DIEA were added to the reaction flask to initiate the reaction, which was protected with argon and stirred at room temperature for 5 h. After completion, the reaction mixture was passed down sintered glass filtered vial and extensively washed with DMF and DCM to remove all waste reagents. The resin was then dried overnight in vacuum, and cleaved with 1 mL of trifluoroacetic acid (TFA)/thioanisole/water/EDT (10/0.5/0.5/025) for 2 hr at room temperature. The cleavage solution was precipitated with 10 mL methyl-tert butyl ether, and the precipitate was washed twice with the same amount of ether. The crude product was purified via preparative-level HPLC (Source 15RPC column, ACTA purifier, Amersham) and eluted with gradient acetonitrile/water from 10 to 35% in 10 min, which was increased to 90% over 8 min before finally being washed 15 min with 95% acetonitrile.

[0489] C16-RB was purified further to >90% and the molecular mass confirmed via LC/MS, utilizing increasing hydrophobicity gradient of acetonitrile in water with 0.01% TFA as described above (Waters X-bridge BEH 130 C18 column, 4.6×100mm, particle size 5 μm, Waters 3100 system). LC spectra were analyzed with MassLynx Softward v. 4.1 (Waters). C16-RB mass (3118.0) was confirmed by electrospray ionization (ESI) mass spectroscopy in linear, positive ion mode. The final product was lyophilized and protected from light at all times. C16-RB was soluble in 50% methanol.

[0490] Bacterial and Cellular Growth

[0491] Streptococcus oralis ATCC 10557, Streptococcus gordonii (Challis), Streptococcus sanguinis (NY101), Streptococcus mitis ATCC 903, Streptococcus salivarius ATCC 13419 and S. mutans wild-type UA140 and JM11 (spectinomycin-resistant) strains were grown in Todd-Hewitt (TH) broth 37° C. in an anaerobic atmosphere of 80% N₂, 10% CO₂, and 10% H₂. BHK-21 (ATCC CRL-10) fibroblasts were propagated in DMEM with 10% FBS, 1 mM sodium pyruvate, 100 units/mL penicillin G, and 100 μg/mL streptomycin at 37° C. with 5% CO₂. Cells were detached with 0.25% trypsin and subcultured as recommended by the supplier.

[0492] Photodynamic Antimicrobial Assays Against Biofilms

[0493] To evaluate C16-RB against monoculture biofilms, S. mutans UA140 was grown overnight in TH prior to inoculation for biofilm formation. For biofilms, 1:5000 dilution of overnight culture was made into TH with 1% sucrose in 2 mL centrifuge tubes (200 μL volume) and grown 24 h under anaerobic conditions. After incubation, biofilms were treated for 5 min with 5 or 25 μM C16-RB or 5 μM RB in 1× PBS, or PBS alone, followed by removal of supernatant and exposure to 5 min blue light (emission 400-550 nm, power 400 mW/cm²) from an Astralis 7 (Ivoclar Vivodent, Austria) handheld LED commonly used as a dental curing light. The light source was suspended 4 cm from the tube bottom (even with the mouth of the tube). A duplicate set of samples were left covered to serve as dark controls. After treatment, biofilms were mechanically disrupted and plated to determine cfu/mL.

[0494] To gauge C16-RB selectivity for S. mutans, similar assays were conducted against multispecies biofilms. Mixed biofilms were seeded by diluting (1:5000) a mixture of equal parts S. oralis, S. gordonii, S. mitis, S. sanguinis, S. salivarius, and S. mutans JM11 (made from overnight cultures) into TH with 1% sucrose, 1% glucose, and 1% mannose. Biofilms were incubated and treated as described above with the addition of vitamin C or potassium gluconate. After the addition of agent and 5 min incubation, biofilms were washed 1× with 1× PBS prior to light exposure. After PDT and biofilm disruption, survivors were plated on TH, and TH supplemented with 800 μg/mL spectinomycin, which allowed for quantitation of surviving total oral streptococci and surviving S. mutans, respectively.

[0495] Evaluation of C16-RB Cytotoxicity

[0496] The effect of RB and C16-RB on human fibroblasts was ascertained by utilizing the Promega CellTiterGlo assay, as described by the manufacturer. Briefly, fibroblasts were grown to confluence, detached, and seeded to ˜5,000 cells per well in a 96-well opaque walled, clear bottom 96-well plate (Nunc International). For long-term dark toxicity, cells were allowed to attach to for 18 h before the culture medium was replaced with medium plus serially-diluted RB or C16-RB (200 μM to 390 nM) or medium alone. After 18-24 h, equal volume Cell Titer Glo reagent was added to each well and mixed. Luciferace activity was then quantified to measure cell viability (Varian Fluorometer in Biolumenescence mode). To measure cytotoxicity after RB or C16-RB light exposure, cells were seeded at ˜10,000 cells per well and allowed to attach for 4 h. Cell growth medium was then replaced with RB or C16-RB containing medium, prior to exposure (a single well at a time) with blue light (400 mW/cm²) suspended ˜3 cm from the well bottom. After exposure, cultures were disrupted with Cell Titer Glo and luciferase activity quantitated as above.

### Results

[0497] Design of Photodynamic Peptide-Dye Conjugate

[0498] For the targeting peptide component of the chimeric molecule, we selected a shortened derivative of S. mutans CSP, CSP_{C16} (sequence: TFFRLFNRSFTQALGK). CSP_{C16} has been utilized successfully as a STAMP targeting peptide in several constructs, and demonstrates selective binding to S. mutans and not other non-cariogenic bacteria. For the photodynamic dye, we selected rose bengal (RB, FIG. 19A), a xanthene dye with a demonstrated record of safety as a diagnostic tool in optometry. Unlike TBO or methylene blue, RB is not recognized by efflux pumps, and has shown robust activity against a variety of bacteria in vitro in the presence of green or blue light (max absorption ˜549 nm), and can be activated by a handheld dental curing LED.

[0499] C16-RB synthesis

[0500] As shown in FIG. 19B, RB was attached to the N-terminus of CSP_{C16} through a succinate/PEG linker to construct the C16-RB molecule. Conventional solid-phase peptide methods were utilized to synthesize CSPC₁₆, followed by linker and RB coupling prior to cleavage from the resin. After cleavage, C16-RB was repeatedly purified by LC/MS prior to evaluation. As shown in FIG. 20, over 95% purity was achieved with the expected mass species observed. The lactone ring in RB was opened as a result of CSP_{C16} attachment. However, we hypothesized that the conjugate would retain enough singlet-oxygen generating activity for a proof-of-principle demonstration, as other xanthene dyes with activity lack this ring.

[0501] C16-RB Efficacy Against Single-Species S. mutans Biofilms

[0502] After synthesis, the basic photosensitization potential of C16-RB was assessed by challenging mature single-species S. mutans biofilms (grown 24 h) with C16-RB or unmodified RB, followed by blue emission from a dental curing light. As shown in FIG. 21, potent antimicrobial activity was observed in cultures exposed to C16-RB or RB and blue light: a reduction in over 3 log₁₀ from input cfu/mL at 5 or 25 μM. In contrast, appreciable decreases in cfu/mL were not observed in S. mutans treated with blue light alone, or 5 μM RB or C16-RB dark controls. Modest dark toxicity was observed in samples treated with 25 μM C16-RB. Overall, these results indicate that the peptide-dye conjugate is active against S. mutans and at roughly similar levels to the parental RB molecule.

[0503] Selective PDT Against Multi-Species Biofilms

[0504] C16-RB was next evaluated for selectivity in mixed cultures containing S. mutans and non-cariogenic oral streptococci that compete for the same niche on the tooth surface. We utilized mixed biofilms of S. mutans transformed with spectinomycin resistance (strain JM11, Merritt, et al., 2005), plus S. oralis, S. gordonii, S. mitis, S. sanguinis, and S. salivarius. The mixed cultures were grown 24 and then treated with RB or C16-RB as indicated, plus potassium gluconate to minimize killing of untargeted bacteria by reducing the superoxide-producing activity of the free C16-RB not bound to S. mutans. Ethanol treatment served as an indiscriminant killing control. As shown in FIG. 21, RB alone exhibited strong indiscriminant photodynamic antimicrobial effects against S. mutans and non-S. mutans in the mixed biofilm system (ratio of surviving S. mutans:non-cariogenic streptococci cfu ˜1). In contrast, C16-RB displayed specific photodynamic activity towards S. mutans, and not the other oral streptococci examined, as reflected in the low ratio of recovered S. mutans to other streptococci. These results suggest C16-RB has antimicrobial activity in the presence of blue light that is specific for S. mutans and dependent on the CSP_{C16} targeting peptide.

[0505] Cytotoxicity Against Eukaryotic Cells

[0506] Given the demonstrated PDT potential of RB-C16, experiments were conducted to examine the cytotoxicity for this conjugate and RB alone. IC₅₀s were obtained for BHK cells exposed C16-RB, RB, or Melittin B (positive control for cytotoxicity), with and without blue light exposure. As shown in Table 23, cytotoxicity was noted for cells exposed to Melittin B at the lowest peptide dilution tested at either 5 min or 24 h, with or without light (IC₅₀ <1.56 μM), while light-dependent toxicity was observed only for RB-treated samples. No photo-associated toxicity was noted in BHK cells treated with C16-RB, though modest light-independent cytotoxicity (IC₅₀=90 μM) was detected after 24 h of exposure. These results suggest that C16-RB is not toxic to BHK cells after illumination, and displays mild toxic effects (when compared to Melittin B) after 24 h exposure.

TABLE 23
Cytotoxicity of RB and C16-RB compounds.

| | IC₅₀ (μM) |
|---|---|
| | BHK |
| 5 min dark: | |
| RB-C16 | >100 |
| RB | >100 |
| Melittin B | <1.56 |
| 5 min w/blue light: | |
| RB-C16 | >100 |
| RB | 40 |
| Melittin B | <1.56 |
| 24 h dark | |
| RB-C16 | 55 |
| RB | 90 |
| Melittin B | <1.56 |

[0507] It is understood that the examples and embodiments described herein are for illustrative purposes only and that various modifications or changes in light thereof will be suggested to persons skilled in the art and are to be included within the spirit and purview of this application and scope of the appended claims. All publications, patents, and patent applications cited herein are hereby incorporated by reference in their entirety for all purposes.

1. A chimeric construct, said construct selected from the group comprising:
an effector attached to a peptide targeting moiety comprising an amino acid sequence found in Table 3 and/or Table 12; and
an antimicrobial peptide comprising an amino acid sequence found in Table 4 and/or Table 5 attached to a targeting moiety.

2. The chimeric construct of claim 1, wherein said targeting moiety is a peptide comprising an amino acid sequence of a peptide found in Table 3 and/or Table 12.

3-5. (canceled)

6. The chimeric construct of claim 1, wherein said effector comprises a moiety selected from the group consisting of an antimicrobial peptide, an antibiotic, a ligand, a lipid or liposome, a agent that physically disrupts the extracellular matrix within a community of microorganisms, and a polymeric particle.

7. The chimeric construct of claim 1, wherein said effector comprises an antimicrobial peptide comprising an amino acid sequence found in Table 4, and/or Table 5, and/or Table 14, and/or Table 15.

8. (canceled)

9. The chimeric construct of claim 1, wherein said effector comprises an antimicrobial peptide comprising an amino acid sequence characterized by a motif selected from the group consisting of KIF, FIK, KIH, HIK, and KIV.

10. The chimeric construct of claim 1, comprising a targeting peptide comprising an amino acid sequence found in Table 3 attached to an antimicrobial peptide comprising an amino acid sequence found in Table 4 and/or Table 5.

11. The chimeric construct of claim 1, comprising an antimicrobial peptide comprising an amino acid sequence found in Table 4 attached to a targeting moiety comprising an amino acid sequence found in Table 3 and/or Table 10, and/or Table 12.

12. The chimeric construct of claim 1, comprising a targeting peptide comprising an amino acid sequence found in Table 3 attached to an antimicrobial peptide comprising an amino acid sequence found in Table 4.

13. The chimeric construct of claim 1, wherein said targeting moiety is chemically conjugated to said effector.

14. The chimeric construct of claim 13, wherein said targeting moiety is chemically conjugated to said effector via a linker.

15. The chimeric construct of claim 13, wherein said targeting moiety is chemically conjugated to said effector via a linker comprising a polyethylene glycol (PEG).

16. The chimeric construct of claim 13, wherein said targeting moiety is chemically conjugated to said effector via a non-peptide linker found in Table 16.

17. The chimeric construct of claim 1, wherein said targeting moiety is linked directly to said effector.

18. The chimeric construct of claim 1, wherein said targeting moiety is linked to said effector via a peptide linkage.

19. The chimeric construct of claim 18, wherein said effector comprises an antimicrobial peptide and said construct is a fusion protein.

20. The chimeric construct of claim 18, wherein said targeting moiety is attached to said effector by a peptide linker comprising or consisting of an amino acid sequence found in Table 16.

21. The chimeric construct of claim 1, wherein said construct bears one or more protecting groups.

22-24. (canceled)

25. The chimeric construct of claim 1, wherein said construct is functionalized with a polymer to increase serum halflife.

26. (canceled)

27. A pharmaceutical composition comprising a chimeric construct of claim 1 in a pharmaceutically acceptable carrier.

28. (canceled)

29. The composition of claim 27, wherein said composition is formulated for administration by a modality selected from the group consisting of intraperitoneal administration, topical administration, oral administration, inhalation administration, transdermal administration, subdermal depot administration, and rectal administration.

30. An antimicrobial composition effective to kill or to inhibit the growth and/or of a microorganism and/or the formation and/or maintenance of a biofilm, said composition comprising one or more isolated antimicrobial peptides, the amino acid sequences of said peptides comprising one or more sequences selected from the amino acid sequences listed in Table 4 and/or Table 5.

31. The composition according to claim 30, wherein said composition is effective to kill or inhibit the growth and/or proliferation of a yeast or fungus, and said composition comprises one or more peptides, the amino acid sequences of said peptides comprising one or more sequences selected from the group of amino acid sequences listed in Table 4 and/or Table 5 identified as effective to effective to kill or inhibit the growth and/or proliferation of a yeast or fungus.

32. The composition according to claim 31, wherein said composition is effective to kill or inhibit the growth and/or proliferation of Aspergillus niger and said composition comprises one or more peptides, the amino acid sequences of said peptides comprising one or more sequences selected from the group of amino acid sequences listed in Table 4 and/or Table 5 identified as effective to effective to kill or inhibit the growth and/or proliferation of Aspergillus niger.

33. The composition according to claim 31, wherein said composition is effective to kill or inhibit the growth and/or proliferation of C. albicans and said composition comprises one or more peptides, the amino acid sequences of said peptides comprising one or more sequences selected from the group of amino acid sequences listed in Table 4 and/or Table 5 identified as effective to effective to kill or inhibit the growth and/or proliferation of C. albicans.

34. The composition according to claim 31, wherein said composition is effective to kill or inhibit the growth and/or proliferation of T. rubrum and said composition comprises one or more peptides, the amino acid sequences of said peptides comprising one or more sequences selected from the group of amino acid sequences listed in Table 4 and/or Table 5 identified as effective to effective to kill or inhibit the growth and/or proliferation of T. rubrum.

35. The composition according to claim 30, wherein said composition is effective to kill or inhibit the growth and/or proliferation of a bacterium, and said composition comprises one or more peptides, the amino acid sequences of said peptides comprising one or more sequences selected from the group of amino acid sequences listed in Table 4 and/or Table 5 identified as effective to effective to kill or inhibit the growth and/or proliferation of a bacterium.

36-55. (canceled)

56. The composition of claim 30, wherein said peptides comprise all “L” amino acids.

57. The composition of claim 30, wherein said peptides comprise all “D” amino acids.

58. The composition of claim 30, wherein said peptides comprise a mixture of “L” and “D” amino acids.

59. The composition of claim 30, wherein said peptides are β peptides.

60. The composition of claim 30, wherein said peptides comprise one or more protecting groups.

61-65. (canceled)

66. A method of killing and/or inhibiting the growth and/or proliferation of a microorganism, said method comprising contacting said microorganism with a chimeric construct of claim 1, or a composition of claim 30.

67. The method of claim 66, wherein said microorganism is a yeast or fungus and said chimeric construct or composition is a chimeric construct of claim 1 comprising an effector identified as killing a yeast or fungus, or a binding moiety identified as binding a yeast or fungus.

68-80. (canceled)

81. A method of detecting a bacterium and/or a bacterial film, said method comprising:
contacting said bacterium or bacterial film with a composition comprising a detectable label attached to a targeting peptide comprising one or more amino acid sequences found Table 3 and/or Table 12; and
detecting said detectable label wherein the quantity and/or location of said detectable label is an indicator of the presence of said bacterium and/or bacterial film.

82. The method of claim 81, wherein said targeting peptide comprises or consists of an amino acid sequence of a peptide found in Table 3.

83. The method of claim 81, wherein said detectable label is a label selected from the group consisting of a radioactive label, a radio-opaque label, a fluorescent dye, a fluorescent protein, an enzymatic label, a colorimetric label, and a quantum dot.

84. A composition comprising a photosensitizing agent attached to a targeting peptide comprising an amino acid sequence of a peptide found in Table 3 and/or Table 12.

85. The composition of claim 84, wherein said targeting peptide comprises or consists of an amino acid sequence of a peptide found in Table 3.

86. The composition of claim 84, wherein said photosensitizing agent is an agent selected from the group consisting of a porphyrinic macrocycle, a porphyrin, a chlorine, a crown ether, an acridine, an azine, a phthalocyanine, a cyanine, a cucumin, a psoralen, and a perylenequinonoid.

87. The composition of claim 84, wherein said photosensitizing agent is an agent shown in any of FIGS. 1-12.

88-90. (canceled)

91. A method of inhibiting the growth or proliferation of a microorganism or a biofilm, said method comprising contacting said microorganism or biofilm with a composition of claim 84.

92. The method of claim 91, further comprising exposing said microorganism or biofilm to a light source.

93. The method of claim 91, wherein said microorganism is a microorganism selected from the group consisting of a bacterium, a yeast, a fungus, a protozoan, and a virus.

94. The method of claim 91, wherein said biofilm comprises a bacterial film.

95. The method of claim 91, wherein said biofilm is a biofilm on an implanted or implantable medical device.

96. The method of claim 91, wherein said microorganism or biofilm is an organism or biofilm in an oral cavity.

97. A formulation comprising:
a targeting peptide, an antimicrobial peptide, and/or a STAMP; and
a salt at a concentration comparable to that found in phosphate buffered saline (PBS) ranging from about 0.5× PBS to about 2.5× PBS.

98. The formulation of claim 97, wherein said formulation comprises a targeting peptide found in Tables 3 or 10.

99-103. (canceled)

104. The formulation of claim 97, wherein said formulation comprises the amino acid sequence of the C16G2 STAMP (TFFRLFNRSFTQALGKGGGKNLRIIRKGIHIIKKY (SEQ ID NO:2).

105-112. (canceled)

The application's sequence listing, which the Patent Office published only in electronic form, follows.

SEQUENCE LISTING (3238 sequences)

SEQ ID NO: 1 - protein, 16 aa, Artificial
  Peptide with targeting and/or antimicrobial activity
TFFRLFNRSFTQALGK

SEQ ID NO: 2 - protein, 35 aa, Artificial
  Peptide with targeting and/or antimicrobial activity
TFFRLFNRSFTQALGKGGGKNLRIIRKGIHIIKKY

SEQ ID NO: 3 - protein, 16 aa, Artificial
  Peptide with targeting and/or antimicrobial activity
TFFRLFNRSFTQALGK

SEQ ID NO: 4 - protein, 12 aa, Artificial
  Peptide with targeting and/or antimicrobial activity
TFFRFLNRGGGK

SEQ ID NO: 5 - protein, 11 aa, Artificial
  Peptide with targeting and/or antimicrobial activity
FIRKFLKKWLL

SEQ ID NO: 6 - protein, 15 aa, Artificial
  Peptide with targeting and/or antimicrobial activity
KKHRKHRKHRKHGGG

SEQ ID NO: 7 - protein, 10 aa, Artificial
  Peptide with targeting and/or antimicrobial activity
DAANEAGGGK

SEQ ID NO: 8 - protein, 11 aa, Artificial
  Peptide with targeting and/or antimicrobial activity
FIRKFLKKWLL

SEQ ID NO: 9 - protein, 15 aa, Artificial
  Peptide with targeting and/or antimicrobial activity
KKHRKHRKHRKHGGG

SEQ ID NO: 10 - protein, 12 aa, Artificial
  Peptide with targeting and/or antimicrobial activity
TFFRFLNRGGGK

SEQ ID NO: 11 - protein, 11 aa, Artificial
  Peptide with targeting and/or antimicrobial activity
FIRKFLKKWLL

SEQ ID NO: 12 - protein, 9 aa, Artificial
  Peptide with targeting and/or antimicrobial activity
DAANEAGGG

SEQ ID NO: 13 - protein, 18 aa, Artificial
  Peptide with targeting and/or antimicrobial activity
VLGIAGGLDAYGELVGGN

SEQ ID NO: 14 - protein, 11 aa, Artificial
  Peptide with targeting and/or antimicrobial activity
LDAYGELVGGN

SEQ ID NO: 15 - protein, 15 aa, Artificial
  Peptide with targeting and/or antimicrobial activity
KFINGVLSQFVLERK

SEQ ID NO: 16 - protein, 20 aa, Artificial
  Peptide with targeting and/or antimicrobial activity
SQRIIEPVKSPQPYPGFSVS

SEQ ID NO: 17 - protein, 22 aa, Artificial
  Peptide with targeting and/or antimicrobial activity
FSVAACGEQRAVTFVLLIEDLI

SEQ ID NO: 18 - protein, 29 aa, Artificial
  Peptide with targeting and/or antimicrobial activity
WAWAESPRCVSTRSNIHALAFRVEVAALT

SEQ ID NO: 19 - protein, 12 aa, Artificial
  Peptide with targeting and/or antimicrobial activity
SPAGLPGDGDEA

SEQ ID NO: 20 - protein, 4 aa, Artificial
  Peptide with targeting and/or antimicrobial activity
RISE

SEQ ID NO: 21 - protein, 22 aa, Artificial
  Peptide with targeting and/or antimicrobial activity
FGNIFKGLKDVIETIVKWTAAK

SEQ ID NO: 22 - protein, 20 aa, Artificial
  Peptide with targeting and/or antimicrobial activity
FRSPCINNNSLQPPGVYPAR

SEQ ID NO: 23 - protein, 12 aa, Artificial
  Peptide with targeting and/or antimicrobial activity
ALAGLAGLISGK

SEQ ID NO: 24 - protein, 9 aa, Artificial
  Peptide with targeting and/or antimicrobial activity
DVILRVEAQ

SEQ ID NO: 25 - protein, 4 aa, Artificial
  Peptide with targeting and/or antimicrobial activity
IDMR

SEQ ID NO: 26 - protein, 8 aa, Artificial
  Peptide with targeting and/or antimicrobial activity
NNAIVYIS

SEQ ID NO: 27 - protein, 9 aa, Artificial
  Peptide with targeting and/or antimicrobial activity
YSKTLHFAD

SEQ ID NO: 28 - protein, 12 aa, Artificial
  Peptide with targeting and/or antimicrobial activity
PGAFRNPQMPRG

SEQ ID NO: 29 - protein, 20 aa, Artificial
  Peptide with targeting and/or antimicrobial activity
PALVDLSNKEAVWAVLDDHS

SEQ ID NO: 30 - protein, 30 aa, Artificial
  Peptide with targeting and/or antimicrobial activity
YVEEAVRAALKKEARISTEDTPVNLPSFDC

SEQ ID NO: 31 - protein, 22 aa, Artificial
  Peptide with targeting and/or antimicrobial activity
VPLDDGTRRPEVARNRDKDRED

SEQ ID NO: 32 - protein, 20 aa, Artificial
  Peptide with targeting and/or antimicrobial activity
PALVDLSNKEAVWAVLDDHS

SEQ ID NO: 33 - protein, 19 aa, Artificial
  Peptide with targeting and/or antimicrobial activity
EEAEEKLAEVSQAVKRLVR

SEQ ID NO: 34 - protein, 26 aa, Artificial
  Peptide with targeting and/or antimicrobial activity
VGLDVSVLVLFFGLQLLSVLLGAMIR

SEQ ID NO: 35 - protein, 38 aa, Artificial
  Peptide with targeting and/or antimicrobial activity
LTILPTTFFAIIVPILAVAFIAYSGFKIKGIVEHKDQW

SEQ ID NO: 36 - protein, 27 aa, Artificial
  Peptide with targeting and/or antimicrobial activity
ALFVSLEQFLVVVAKSVFALCHSGTLS

SEQ ID NO: 37 - protein, 25 aa, Artificial
  Peptide with targeting and/or antimicrobial activity
VSRDEAMEFIDREWTTLQPAGKSHA

SEQ ID NO: 38 - protein, 32 aa, Artificial
  Peptide with targeting and/or antimicrobial activity
GSVIKKRRKRMSKKKHRKMLRRTRVQRRKLGK

SEQ ID NO: 39 - protein, 27 aa, Artificial
  Peptide with targeting and/or antimicrobial activity
GKAKPYQVRQVLRAVDKLETRRKKGGR

SEQ ID NO: 40 - protein, 18 aa, Artificial
  Peptide with targeting and/or antimicrobial activity
NATGTDIGEVTLTLGRFS

SEQ ID NO: 41 - protein, 20 aa, Artificial
  Peptide with targeting and/or antimicrobial activity
VSFLAGWLCLGLAAWRLGNA

SEQ ID NO: 42 - protein, 37 aa, Artificial
  Peptide with targeting and/or antimicrobial activity
VRTLTILVIFIFNYLKSISYKLKQPFENNLAQSMISI

SEQ ID NO: 43 - protein, 27 aa, Artificial
  Peptide with targeting and/or antimicrobial activity
AFWLNILLTLLGYIPGIVHAVYIIAKR

SEQ ID NO: 44 - protein, 36 aa, Artificial
  Peptide with targeting and/or antimicrobial activity
EICLTLVFPIRGSYSEAAKFPVPIHIVEDGTVELPK

SEQ ID NO: 45 - protein, 20 aa, Artificial
  Peptide with targeting and/or antimicrobial activity
VYRHLRFIDGKLVEIRLERK

SEQ ID NO: 46 - protein, 22 aa, Artificial
  Peptide with targeting and/or antimicrobial activity
YIVGALVILAVAGLIYSMLRKA

SEQ ID NO: 47 - protein, 18 aa, Artificial
  Peptide with targeting and/or antimicrobial activity
VMFVLTRGRSPRPMIPAY

SEQ ID NO: 48 - protein, 19 aa, Artificial
  Peptide with targeting and/or antimicrobial activity
FGFCVWMYQLLAGPPGPPA

SEQ ID NO: 49 - protein, 14 aa, Artificial
  Peptide with targeting and/or antimicrobial activity
QRVSLWSEVEHEFR

SEQ ID NO: 50 - protein, 23 aa, Artificial
  Peptide with targeting and/or antimicrobial activity
KRGSKIVIAIAVVLIVLAGVWVW

SEQ ID NO: 51 - protein, 28 aa, Artificial
  Peptide with targeting and/or antimicrobial activity
TVLDWLSLALATGLFVYLLVALLRADRA

SEQ ID NO: 52 - protein, 18 aa, Artificial
  Peptide with targeting and/or antimicrobial activity
DRCLSVLSWSPPKVSPLI

SEQ ID NO: 53 - protein, 17 aa, Artificial
  Peptide with targeting and/or antimicrobial activity
DPALADFAAGMRAQVRT

SEQ ID NO: 54 - protein, 22 aa, Artificial
  Peptide with targeting and/or antimicrobial activity
WTKPSFTDLRLGFEVTLYFANR

SEQ ID NO: 55 - protein, 17 aa, Artificial
  Peptide with targeting and/or antimicrobial activity
FSFKQRVMFRKEVERLR

SEQ ID NO: 56 - protein, 15 aa, Artificial
  Peptide with targeting and/or antimicrobial activity
VIKISVPGQVQMLIP

SEQ ID NO: 57 - protein, 26 aa, Artificial
  Peptide with targeting and/or antimicrobial activity
KLQVHHGRATHTLLLQPPLCAPGTIR

SEQ ID NO: 58 - protein, 25 aa, Artificial
  Peptide with targeting and/or antimicrobial activity
SLVRIHDQQPWVTRGAFIDAARTCS

SEQ ID NO: 59 - protein, 17 aa, Artificial
  Peptide with targeting and/or antimicrobial activity
HSDEPIPNILFKSDSVH

SEQ ID NO: 60 - protein, 22 aa, Artificial
  Peptide with targeting and/or antimicrobial activity
GKPKRMPAEFIDGYGQALLAGA

SEQ ID NO: 61 - protein, 20 aa, Artificial
  Peptide with targeting and/or antimicrobial activity
DEYPAKLPLSDKGATEPRRH

SEQ ID NO: 62 - protein, 26 aa, Artificial
  Peptide with targeting and/or antimicrobial activity
SDILAEMFEKGELQTLVKDAAAKANA

SEQ ID NO: 63 - protein, 12 aa, Artificial
  Peptide with targeting and/or antimicrobial activity
RWVSCNPSWRIQ

SEQ ID NO: 64 - protein, 25 aa, Artificial
  Peptide with targeting and/or antimicrobial activity
NHKTLKEWKAKWGPEAVESWATLLG

SEQ ID NO: 65 - protein, 14 aa, Artificial
  Peptide with targeting and/or antimicrobial activity
LALIGAGIWMIRKG

SEQ ID NO: 66 - protein, 24 aa, Artificial
  Peptide with targeting and/or antimicrobial activity
RLEYRRLETQVEENPESGRRPMRG

SEQ ID NO: 67 - protein, 19 aa, Artificial
  Peptide with targeting and/or antimicrobial activity
CDDLHALERAGKLDALLSA

SEQ ID NO: 68 - protein, 25 aa, Artificial
  Peptide with targeting and/or antimicrobial activity
AVGNNLGKDNDSGHRGKKHRKHKHR

SEQ ID NO: 69 - protein, 22 aa, Artificial
  Peptide with targeting and/or antimicrobial activity
YLTSLGLDAAEQAQGLLTILKG

SEQ ID NO: 70 - protein, 24 aa, Artificial
  Peptide with targeting and/or antimicrobial activity
HATLLPAVREAISRQLLPALVPRG

SEQ ID NO: 71 - protein, 21 aa, Artificial
  Peptide with targeting and/or antimicrobial activity
GCKGCAQRDPCAEPEPYFRLR

SEQ ID NO: 72 - protein, 22 aa, Artificial
  Peptide with targeting and/or antimicrobial activity
EPLILKELVRNLFLFCYARALR

SEQ ID NO: 73 - protein, 21 aa, Artificial
  Peptide with targeting and/or antimicrobial activity
QTVHHIHMHVLGQRQMHWPPG

SEQ ID NO: 74 - protein, 27 aa, Artificial
  Peptide with targeting and/or antimicrobial activity
HARAAVGVAELPRGAAVEVELIAAVRP

SEQ ID NO: 75 - protein, 27 aa, Artificial
  Peptide with targeting and/or antimicrobial activity
DTDCLSRAYAQRIDELDKQYAGIDKPL

SEQ ID NO: 76 - protein, 24 aa, Artificial
  Peptide with targeting and/or antimicrobial activity
GQRQRLTCGRVSGCSEGPSREAAR

SEQ ID NO: 77 - protein, 11 aa, Artificial
  Peptide with targeting and/or antimicrobial activity
GGTKEIVYQRG

SEQ ID NO: 78 - protein, 12 aa, Artificial
  Peptide with targeting and/or antimicrobial activity
ILSQEADRKKLF

SEQ ID NO: 79 - protein, 15 aa, Artificial
  Peptide with targeting and/or antimicrobial activity
NRQAQGERAHGEQQG

SEQ ID NO: 80 - protein, 13 aa, Artificial
  Peptide with targeting and/or antimicrobial activity
KIDTNQWPPNKEG

SEQ ID NO: 81 - protein, 11 aa, Artificial
  Peptide with targeting and/or antimicrobial activity
EPTDGVACKER

SEQ ID NO: 82 - protein, 27 aa, Artificial
  Peptide with targeting and/or antimicrobial activity
GWWEELLHETILSKFKITKALELPIQL

SEQ ID NO: 83 - protein, 26 aa, Artificial
  Peptide with targeting and/or antimicrobial activity
DIDWGRKISCAAGVAYGAIDGCATTV

SEQ ID NO: 84 - protein, 23 aa, Artificial
  Peptide with targeting and/or antimicrobial activity
GVARGLQLGIKTRTQWGAATGAA

SEQ ID NO: 85 - protein, 17 aa, Artificial
  Peptide with targeting and/or antimicrobial activity
EMRLSKFFRDFILWRKK

SEQ ID NO: 86 - protein, 17 aa, Artificial
  Peptide with targeting and/or antimicrobial activity
EMRISRIILDFLFLRKK

SEQ ID NO: 87 - protein, 28 aa, Artificial
  Peptide with targeting and/or antimicrobial activity
FFKTIFVLILGALGVAAGLYIEKNYIDK

SEQ ID NO: 88 - protein, 28 aa, Artificial
  Peptide with targeting and/or antimicrobial activity
FGTPWSITNFWKKNFNDRPDFDSDRRRY

SEQ ID NO: 89 - protein, 13 aa, Artificial
  Peptide with targeting and/or antimicrobial activity
GGNLGPGFGVIIP

SEQ ID NO: 90 - protein, 19 aa, Artificial
  Peptide with targeting and/or antimicrobial activity
AIATGLDIVDGKFDGYLWA

SEQ ID NO: 91 - protein, 28 aa, Artificial
  Peptide with targeting and/or antimicrobial activity
FGVGVGIALFMAGYAIGKDLRKKFGKSC

SEQ ID NO: 92 - protein, 31 aa, Artificial
  Peptide with targeting and/or antimicrobial activity
QKPRKNETFIGYIQRYDIDGNGYQSLPCPQN

SEQ ID NO: 93 - protein, 32 aa, Artificial
  Peptide with targeting and/or antimicrobial activity
FRKKRYGLSILLWLNAFTNLVNSIHAFYMTLF

SEQ ID NO: 94 - protein, 24 aa, Artificial
  Peptide with targeting and/or antimicrobial activity
VMASLTWRMRAASASLPTHSRTDA

SEQ ID NO: 95 - protein, 19 aa, Artificial
  Peptide with targeting and/or antimicrobial activity
HRKNPVLGVGRRHRAHNVA

SEQ ID NO: 96 - protein, 13 aa, Artificial
  Peptide with targeting and/or antimicrobial activity
EAVGQDLVDAHHP

SEQ ID NO: 97 - protein, 23 aa, Artificial
  Peptide with targeting and/or antimicrobial activity
HEDDKRRGMSVEVLGFEVVQHEE

SEQ ID NO: 98 - protein, 8 aa, Artificial
  Peptide with targeting and/or antimicrobial activity
RNVIGQVL

SEQ ID NO: 99 - protein, 27 aa, Artificial
  Peptide with targeting and/or antimicrobial activity
TSVRPGAAGAAVPAGAAGAAGAGWRWP

SEQ ID NO: 100 - protein, 19 aa, Artificial
  Peptide with targeting and/or antimicrobial activity
GQDEGQRRAGVGEGQGVDG

SEQ ID NO: 101 - protein, 8 aa, Artificial
  Peptide with targeting and/or antimicrobial activity
AMRSVNQA

SEQ ID NO: 102 - protein, 18 aa, Artificial
  Peptide with targeting and/or antimicrobial activity
DQVAHSGDMLVQARRRDS

SEQ ID NO: 103 - protein, 27 aa, Artificial
  Peptide with targeting and/or antimicrobial activity
GHLLRVGGRVGGVGGVAGACAQPFGGQ

SEQ ID NO: 104 - protein, 12 aa, Artificial
  Peptide with targeting and/or antimicrobial activity
VAGACAQPFGGQ

SEQ ID NO: 105 - protein, 32 aa, Artificial
  Peptide with targeting and/or antimicrobial activity
GVAERNLDRITVAVAIIWTITIVGLGLVAKLG

SEQ ID NO: 106 - protein, 32 aa, Artificial
  Peptide with targeting and/or antimicrobial activity
VRSAKAVKALTAAGYTGELVNVSGGMKAWLGQ

SEQ ID NO: 107 - protein, 7 aa, Artificial
  Peptide with targeting and/or antimicrobial activity
MKAWLGQ

SEQ ID NO: 108 - protein, 37 aa, Artificial
  Peptide with targeting and/or antimicrobial activity
LDPLEPRIAPPGDRSHQGAPACHRDPLRGRSARDAER

SEQ ID NO: 109 - protein, 29 aa, Artificial
  Peptide with targeting and/or antimicrobial activity
RLRVGRATDLPLTSFAVGVVRNLPDAPAH

SEQ ID NO: 110 - protein, 30 aa, Artificial
  Peptide with targeting and/or antimicrobial activity
WKRLWPARILAGHSRRRMRWMVVWRYFAAT

SEQ ID NO: 111 - protein, 22 aa, Artificial
  Peptide with targeting and/or antimicrobial activity
AQFYEAIITGYALGAGQRIGQL

SEQ ID NO: 112 - protein, 24 aa, Artificial
  Peptide with targeting and/or antimicrobial activity
RAVAAHLQGRHHGHQVRRQRHGQR

SEQ ID NO: 113 - protein, 19 aa, Artificial
  Peptide with targeting and/or antimicrobial activity
GEGLPPPVLHLPPPRMSGR

SEQ ID NO: 114 - protein, 14 aa, Artificial
  Peptide with targeting and/or antimicrobial activity
DALRRSRSQGRRHR

SEQ ID NO: 115 - protein, 17 aa, Artificial
  Peptide with targeting and/or antimicrobial activity
SPVPRFTAVGGVSRGSP

SEQ ID NO: 116 - protein, 11 aa, Artificial
  Peptide with targeting and/or antimicrobial activity
WGPLGPERPLW

SEQ ID NO: 117 - protein, 11 aa, Artificial
  Peptide with targeting and/or antimicrobial activity
VTTNVRQGAGS

SEQ ID NO: 118 - protein, 14 aa, Artificial
  Peptide with targeting and/or antimicrobial activity
LAAKTAVCVGRAFM

SEQ ID NO: 119 - protein, 26 aa, Artificial
  Peptide with targeting and/or antimicrobial activity
GRLSRREEDPATSIILLRGAYRMAVF

SEQ ID NO: 120 - protein, 13 aa, Artificial
  Peptide with targeting and/or antimicrobial activity
SDNDGKLILGTSQ

SEQ ID NO: 121 - protein, 36 aa, Artificial
  Peptide with targeting and/or antimicrobial activity
HGAHQRTGQRLHHHRGRTVSGCRQNPVAGVDPDEHR

SEQ ID NO: 122 - protein, 23 aa, Artificial
  Peptide with targeting and/or antimicrobial activity
RQAPGPGLVTITAACSAPGSRSR

SEQ ID NO: 123 - protein, 10 aa, Artificial
  Peptide with targeting and/or antimicrobial activity
LLIERFSNHH

SEQ ID NO: 124 - protein, 9 aa, Artificial
  Peptide with targeting and/or antimicrobial activity
MILHRRRDR

SEQ ID NO: 125 - protein, 20 aa, Artificial
  Peptide with targeting and/or antimicrobial activity
GPGVVGPAPFSRLPAHALNL

SEQ ID NO: 126 - protein, 32 aa, Artificial
  Peptide with targeting and/or antimicrobial activity
TASPPAPSDQGLRTAFPATLLIALAALARISR

SEQ ID NO: 127 - protein, 39 aa, Artificial
  Peptide with targeting and/or antimicrobial activity
SPATQKAPTRAQPSRAPVQDCGDGRPTAAPDDVERLSPR

SEQ ID NO: 128 - protein, 20 aa, Artificial
  Peptide with targeting and/or antimicrobial activity
DVRDRVDLAGADLCAAHATR

SEQ ID NO: 129 - protein, 28 aa, Artificial
  Peptide with targeting and/or antimicrobial activity
FAKETGFGIGGAQEGWWIIADIYGPNPF

SEQ ID NO: 130 - protein, 23 aa, Artificial
  Peptide with targeting and/or antimicrobial activity
GAIPDPVTHRVDWEEDHQTRPSR

SEQ ID NO: 131 - protein, 29 aa, Artificial
  Peptide with targeting and/or antimicrobial activity
LVRRNAVAGRSDGLAGAEQLDLVRLQGVL

SEQ ID NO: 132 - protein, 9 aa, Artificial
  Peptide with targeting and/or antimicrobial activity
LFDERNKIA

SEQ ID NO: 133 - protein, 18 aa, Artificial
  Peptide with targeting and/or antimicrobial activity
DAITGGNPPLSDTDGLRP

SEQ ID NO: 134 - protein, 13 aa, Artificial
  Peptide with targeting and/or antimicrobial activity
QGLARPVLRRIPL

SEQ ID NO: 135 - protein, 18 aa, Artificial
  Peptide with targeting and/or antimicrobial activity
YDPVPKRKNKNSEGKREE

SEQ ID NO: 136 - protein, 17 aa, Artificial
  Peptide with targeting and/or antimicrobial activity
SGSAIRMLEIATKMLKR

SEQ ID NO: 137 - protein, 19 aa, Artificial
  Peptide with targeting and/or antimicrobial activity
YDKYIKYLSIQPPFIVYFI

SEQ ID NO: 138 - protein, 56 aa, Artificial
  Peptide with targeting and/or antimicrobial activity
QKIIDMSKFLFSLILFIMIVVIYIGKSIGGYSAIVSSIMLELDTVLYNKKIFFIYK

SEQ ID NO: 139 - protein, 9 aa, Artificial
  Peptide with targeting and/or antimicrobial activity
DEVWKMLGI

SEQ ID NO: 140 - protein, 39 aa, Artificial
  Peptide with targeting and/or antimicrobial activity
YSKKLFEYFYFIIFILIRYLIFYKIIQNKNYYINNIAYN

SEQ ID NO: 141 - protein, 35 aa, Artificial
  Peptide with targeting and/or antimicrobial activity
YFIKDDNEALSKDWEVIGNDLKGTIDKYGKEFKVR

SEQ ID NO: 142 - protein, 14 aa, Artificial
  Peptide with targeting and/or antimicrobial activity
SRLVREIKKKCRKS

SEQ ID NO: 143 - protein, 24 aa, Artificial
  Peptide with targeting and/or antimicrobial activity
FESLLPQATKKIVNNKGSKINKIF

SEQ ID NO: 144 - protein, 17 aa, Artificial
  Peptide with targeting and/or antimicrobial activity
ELLTQIRLALLYSVNEW

SEQ ID NO: 145 - protein, 55 aa, Artificial
  Peptide with targeting and/or antimicrobial activity
PLNFYRAVKENRLPLSEKNINDFTNIKLKVSPKLINLLQESSIFYNFSPKKRNTN

SEQ ID NO: 146 - protein, 42 aa, Artificial
  Peptide with targeting and/or antimicrobial activity
YPNEYCIFLENLSLEELKEIKAINGETLNLEEIINERKNLKD

SEQ ID NO: 147 - protein, 39 aa, Artificial
  Peptide with targeting and/or antimicrobial activity
AVAGAAVGALLGNDARSTAVGAAIGGALGAGAGELTKNK

SEQ ID NO: 148 - protein, 39 aa, Artificial
  Peptide with targeting and/or antimicrobial activity
IKGTIAFVGEDYVEIRVDKGVKLTFRKSAIANVINNNQQ

SEQ ID NO: 149 - protein, 28 aa, Artificial
  Peptide with targeting and/or antimicrobial activity
KKFIILLFILVQGLIFSATKTLSDIIAL

SEQ ID NO: 150 - protein, 16 aa, Artificial
  Peptide with targeting and/or antimicrobial activity
FTQGIKRIVLKRLKED

SEQ ID NO: 151 - protein, 29 aa, Artificial
  Peptide with targeting and/or antimicrobial activity
MPKRHYYKLEAKALQFGLPFAYSPIQLLK

SEQ ID NO: 152 - protein, 18 aa, Artificial
  Peptide with targeting and/or antimicrobial activity
IIELHPKSWTQDWRCSFL

SEQ ID NO: 153 - protein, 39 aa, Artificial
  Peptide with targeting and/or antimicrobial activity
VEAGKRNISLENIEKISKGLGISISELFKYIEEGEDKIG

SEQ ID NO: 154 - protein, 31 aa, Artificial
  Peptide with targeting and/or antimicrobial activity
RNSADNQTKIDKIRIDISLWDEHLNIVKQGK

SEQ ID NO: 155 - protein, 30 aa, Artificial
  Peptide with targeting and/or antimicrobial activity
GVENRRFYERDVSKVSMMTSEAVAPRGGSK

SEQ ID NO: 156 - protein, 22 aa, Artificial
  Peptide with targeting and/or antimicrobial activity
IVELDDTTILERALSMLGEANA

SEQ ID NO: 157 - protein, 23 aa, Artificial
  Peptide with targeting and/or antimicrobial activity
SVRAVKPIDETVARHFPGDFIVN

SEQ ID NO: 158 - protein, 32 aa, Artificial
  Peptide with targeting and/or antimicrobial activity
YINRRLKKAFSDADIKEAPAEFYEELRRVQYV

SEQ ID NO: 159 - protein, 23 aa, Artificial
  Peptide with targeting and/or antimicrobial activity
SVRAVKPIDEIVAWHFPGDFIVN

SEQ ID NO: 160 - protein, 29 aa, Artificial
  Peptide with targeting and/or antimicrobial activity
YVSADESAYNHIVTDDIPLADRRIEAVQQ

SEQ ID NO: 161 - protein, 9 aa, Artificial
  Peptide with targeting and/or antimicrobial activity
YIACPGYFY

SEQ ID NO: 162 - protein, 13 aa, Artificial
  Peptide with targeting and/or antimicrobial activity
YFSFLEIVGMARR

SEQ ID NO: 163 - protein, 28 aa, Artificial
  Peptide with targeting and/or antimicrobial activity
LKLAFGVYPFQAMSQSDTAVSERNVLWR

SEQ ID NO: 164 - protein, 29 aa, Artificial
  Peptide with targeting and/or antimicrobial activity
GRFQISIRGEEKSKVKVQGKGTFTDRNTT

SEQ ID NO: 165 - protein, 30 aa, Artificial
  Peptide with targeting and/or antimicrobial activity
RRFRKTTENREKSKNKKAVLGLSTTSTASY

SEQ ID NO: 166 - protein, 29 aa, Artificial
  Peptide with targeting and/or antimicrobial activity
WENKPSPLGSIKKLQGLVYRLIGYRHFWV

SEQ ID NO: 167 - protein, 30 aa, Artificial
  Peptide with targeting and/or antimicrobial activity
IFSLHHFALICSEMGTFAVSKRAKYKWEVL

SEQ ID NO: 168 - protein, 11 aa, Artificial
  Peptide with targeting and/or antimicrobial activity
AQYKYINKLLN

SEQ ID NO: 169 - protein, 30 aa, Artificial
  Peptide with targeting and/or antimicrobial activity
NKVLQVEVMWDGSVVGRPAGVISIKSSKKG

SEQ ID NO: 170 - protein, 28 aa, Artificial
  Peptide with targeting and/or antimicrobial activity
QKAKEESDRKAAVSYNGFHRVNVVSIPK

SEQ ID NO: 171 - protein, 31 aa, Artificial
  Peptide with targeting and/or antimicrobial activity
MENILIYIPMVLSPFGSGILLFLGKDRRYML

SEQ ID NO: 172 - protein, 29 aa, Artificial
  Peptide with targeting and/or antimicrobial activity
KKSHSQGKRKLKDLNSAYKIDNQLHYALR

SEQ ID NO: 173 - protein, 23 aa, Artificial
  Peptide with targeting and/or antimicrobial activity
CYDSFDFSIFVTFANRMKLSVGS

SEQ ID NO: 174 - protein, 17 aa, Artificial
  Peptide with targeting and/or antimicrobial activity
AQSAGQIKRKSKVRIHV

SEQ ID NO: 175 - protein, 35 aa, Artificial
  Peptide with targeting and/or antimicrobial activity
SRMSEHSPAGLVFEVGPMDKGSFIILDSYHPTVKK

SEQ ID NO: 176 - protein, 41 aa, Artificial
  Peptide with targeting and/or antimicrobial activity
ELHRIMSTEKIGAVTKMNFDTAPIMSILPIDIYPKEVGIGS

SEQ ID NO: 177 - protein, 31 aa, Artificial
  Peptide with targeting and/or antimicrobial activity
FARVRRLHQNRILTQPLTNLKYCLRQPIYSD

SEQ ID NO: 178 - protein, 30 aa, Artificial
  Peptide with targeting and/or antimicrobial activity
AYGKVFSMDIMLSENDKLIVLRISHHSAWH

SEQ ID NO: 179 - protein, 23 aa, Artificial
  Peptide with targeting and/or antimicrobial activity
SVRAVKPIDKTVARHFPGDFIVN

SEQ ID NO: 180 - protein, 13 aa, Artificial
  Peptide with targeting and/or antimicrobial activity
FEGLKNLLGDDII

SEQ ID NO: 181 - protein, 12 aa, Artificial
  Peptide with targeting and/or antimicrobial activity
LFRKEDQEHVLL

SEQ ID NO: 182 - protein, 21 aa, Artificial
  Peptide with targeting and/or antimicrobial activity
SGGSDTDGSSSGEPGSHSGDL

SEQ ID NO: 183 - protein, 10 aa, Artificial
  Peptide with targeting and/or antimicrobial activity
GEPGSHSGDL

SEQ ID NO: 184 - protein, 27 aa, Artificial
  Peptide with targeting and/or antimicrobial activity
PVGDIMSGFLRGANQPRFLLDHISFGS

SEQ ID NO: 185 - protein, 26 aa, Artificial
  Peptide with targeting and/or antimicrobial activity
GTNVPTQILGYSREERFDYEPAPEQR

SEQ ID NO: 186 - protein, 27 aa, Artificial
  Peptide with targeting and/or antimicrobial activity
LLASHPERLSLGVFFVYRVLHLLLENT

SEQ ID NO: 187 - protein, 16 aa, Artificial
  Peptide with targeting and/or antimicrobial activity
TCYPLIQRKTDRAYEA

SEQ ID NO: 188 - protein, 10 aa, Artificial
  Peptide with targeting and/or antimicrobial activity
VVFGGGDRLV

SEQ ID NO: 189 - protein, 7 aa, Artificial
  Peptide with targeting and/or antimicrobial activity
YGKESDP

SEQ ID NO: 190 - protein, 18 aa, Artificial
  Peptide with targeting and/or antimicrobial activity
LTASICRQWNDNSTPYQR

SEQ ID NO: 191 - protein, 27 aa, Artificial
  Peptide with targeting and/or antimicrobial activity
PLRSFVAEKAEHAFRVVRIADFDFGHS

SEQ ID NO: 192 - protein, 18 aa, Artificial
  Peptide with targeting and/or antimicrobial activity
ALLVLNLLLMQFFFGKNM

SEQ ID NO: 193 - protein, 17 aa, Artificial
  Peptide with targeting and/or antimicrobial activity
HYHFLLEFGFHKGDYLE

SEQ ID NO: 194 - protein, 8 aa, Artificial
  Peptide with targeting and/or antimicrobial activity
HRKDVYKK

SEQ ID NO: 195 - protein, 41 aa, Artificial
  Peptide with targeting and/or antimicrobial activity
IQIIVNAFVEKDKTGAVIEVLYASNNHEKVKAKYEELVAIS

SEQ ID NO: 196 - protein, 17 aa, Artificial
  Peptide with targeting and/or antimicrobial activity
ILVLLALQVELDSKFQY

SEQ ID NO: 197 - protein, 25 aa, Artificial
  Peptide with targeting and/or antimicrobial activity
LMIFDKHANLKYKYGNRSFGVEAIM

SEQ ID NO: 198 - protein, 17 aa, Artificial
  Peptide with targeting and/or antimicrobial activity
AASGFTYCASNGVWHPY

SEQ ID NO: 199 - protein, 32 aa, Artificial
  Peptide with targeting and/or antimicrobial activity
KPEKEKLDTNTLMKVVNKALSLFDRLLIKFGA

SEQ ID NO: 200 - protein, 41 aa, Artificial
  Peptide with targeting and/or antimicrobial activity
TEILNFLITVCADRENWKIKHGLSDSVLLIFFARFTGAEYW

SEQ ID NO: 201 - protein, 51 aa, Artificial
  Peptide with targeting and/or antimicrobial activity
MPVSKKRYMLSSAYATALGICYGQVATDEKESEITAIPDLLDYLSVEEYLL

SEQ ID NO: 202 - protein, 18 aa, Artificial
  Peptide with targeting and/or antimicrobial activity
RAGRIKKLSQKEAEPFEN

SEQ ID NO: 203 - protein, 42 aa, Artificial
  Peptide with targeting and/or antimicrobial activity
MRFKRFDRDYALSGDNVFEVLTASCDVIERNLSYREMCGLMQ

SEQ ID NO: 204 - protein, 18 aa, Artificial
  Peptide with targeting and/or antimicrobial activity
KRKHENVIVAEEMRVIKN

SEQ ID NO: 205 - protein, 41 aa, Artificial
  Peptide with targeting and/or antimicrobial activity
LCRLEKLCKQFLRQDKVVTYYLMLPYKRAIEAFYQELKERS

SEQ ID NO: 206 - protein, 37 aa, Artificial
  Peptide with targeting and/or antimicrobial activity
YPFCLATVDHLPEGLSVTDYERVQRLVSQFLLNKEER

SEQ ID NO: 207 - protein, 30 aa, Artificial
  Peptide with targeting and/or antimicrobial activity
SPLEKYGTGSMTALTFLLGCCLLVLSKKSR

SEQ ID NO: 208 - protein, 25 aa, Artificial
  Peptide with targeting and/or antimicrobial activity
KRKRWAILTLFLAGLGAVGIVLATF

SEQ ID NO: 209 - protein, 34 aa, Artificial
  Peptide with targeting and/or antimicrobial activity
VCFKDISVFLSPFRGQEVLFCGKAKHSLIYVIGT

SEQ ID NO: 210 - protein, 13 aa, Artificial
  Peptide with targeting and/or antimicrobial activity
FFLNVIAIRIPHF

SEQ ID NO: 211 - protein, 35 aa, Artificial
  Peptide with targeting and/or antimicrobial activity
MLSNVLSRSVVSPNVDIPNSMVILSPLLISISNYH

SEQ ID NO: 212 - protein, 22 aa, Artificial
  Peptide with targeting and/or antimicrobial activity
KLIFAALGLVFLLIGLRDSRSK

SEQ ID NO: 213 - protein, 16 aa, Artificial
  Peptide with targeting and/or antimicrobial activity
RNINVSATFITEKSLV

SEQ ID NO: 214 - protein, 37 aa, Artificial
  Peptide with targeting and/or antimicrobial activity
DIGRIIGKKGRTITAIRSIVYSVPTQGKKVRLVIDEK

SEQ ID NO: 215 - protein, 24 aa, Artificial
  Peptide with targeting and/or antimicrobial activity
RIEASLISAIMFSMFNAIVKFLQK

SEQ ID NO: 216 - protein, 40 aa, Artificial
  Peptide with targeting and/or antimicrobial activity
NQKMEINSMTSEKEKMLAGHFHNEANFAVIFKYSLFYNFF

SEQ ID NO: 217 - protein, 38 aa, Artificial
  Peptide with targeting and/or antimicrobial activity
RRSLGNSASFAEWIEYIRYLHYIIRVQFIHFFSKNKKI

SEQ ID NO: 218 - protein, 38 aa, Artificial
  Peptide with targeting and/or antimicrobial activity
KLQEKQIDRNFERVSGYSTYRAVQAAKAKEKGFISLEN

SEQ ID NO: 219 - protein, 44 aa, Artificial
  Peptide with targeting and/or antimicrobial activity
IFKLFEEHLLYLLDAFYYSKIFRRLKQGLYRRKEQPYTQDLFRM

SEQ ID NO: 220 - protein, 41 aa, Artificial
  Peptide with targeting and/or antimicrobial activity
EFLEKFKVLKQPRKANNISKNRVAMIFLTIHKSRGFLSSPY

SEQ ID NO: 221 - protein, 41 aa, Artificial
  Peptide with targeting and/or antimicrobial activity
TDQELEHLIVTELESKRLDFTYSKDITEFFDEAFPEYDQNY

SEQ ID NO: 222 - protein, 41 aa, Artificial
  Peptide with targeting and/or antimicrobial activity
DNFYLILKMEERGKSKKTSQTRGFRAFFDIIRKKIKKEDGK

SEQ ID NO: 223 - protein, 21 aa, Artificial
  Peptide with targeting and/or antimicrobial activity
EDPVPNHFTLRRNKKEKPSKS

SEQ ID NO: 224 - protein, 35 aa, Artificial
  Peptide with targeting and/or antimicrobial activity
IFNRRKFFQYFGLSKEAMVEHIQPFILDIWQIHLF

SEQ ID NO: 225 - protein, 29 aa, Artificial
  Peptide with targeting and/or antimicrobial activity
ADDLLNKRLTDLIMENAETVKTIDLDNSD

SEQ ID NO: 226 - protein, 40 aa, Artificial
  Peptide with targeting and/or antimicrobial activity
VILGNGISNIAQTLGQLPNIAWVWIYMVLIAALLEESNVC

SEQ ID NO: 227 - protein, 30 aa, Artificial
  Peptide with targeting and/or antimicrobial activity
KQVQNTTLIICGTVLLGILFKSYLKSQKSV

SEQ ID NO: 228 - protein, 36 aa, Artificial
  Peptide with targeting and/or antimicrobial activity
SENIARFAAAFENEQVVSYARWFRRSWRGSGSSSRF

SEQ ID NO: 229 - protein, 9 aa, Artificial
  Peptide with targeting and/or antimicrobial activity
IGGALNSCG

SEQ ID NO: 230 - protein, 52 aa, Artificial
  Peptide with targeting and/or antimicrobial activity
VFSVLKHTTWPTRKQSWHDFISILEYSAFFALVIFIFDKLLTLGLAELLKRF

SEQ ID NO: 231 - protein, 38 aa, Artificial
  Peptide with targeting and/or antimicrobial activity
LVQGDTILIENHVGTPVKDDGKDCLIIREADVLAVVND

SEQ ID NO: 232 - protein, 30 aa, Artificial
  Peptide with targeting and/or antimicrobial activity
MKKNLKRFYALVLGFIIGCLFVSILIFIGY

SEQ ID NO: 233 - protein, 41 aa, Artificial
  Peptide with targeting and/or antimicrobial activity
KTKESLTQQEKKFLKDYDRKSLHHFRDILTYCFILDKLTNK

SEQ ID NO: 234 - protein, 20 aa, Artificial
  Peptide with targeting and/or antimicrobial activity
KGKSLMPLLKQINQWGKLYL

SEQ ID NO: 235 - protein, 48 aa, Artificial
  Peptide with targeting and/or antimicrobial activity
IILAKAADLAEIERIISEDPFKINEIANYDIIEFCPTKSSKAFEKVLK

SEQ ID NO: 236 - protein, 29 aa, Artificial
  Peptide with targeting and/or antimicrobial activity
TINIDDKVLDYLKKINSKAITIDLIGCAS

SEQ ID NO: 237 - protein, 20 aa, Artificial
  Peptide with targeting and/or antimicrobial activity
EKLKKILLKLAVCGKAWYTL

SEQ ID NO: 238 - protein, 32 aa, Artificial
  Peptide with targeting and/or antimicrobial activity
NILYFIHDENQWEPQKAEIFRGSIKHCAWLSS

SEQ ID NO: 239 - protein, 29 aa, Artificial
  Peptide with targeting and/or antimicrobial activity
SFEKNKIENNLKIAQAYIYIKPKPRICQA

SEQ ID NO: 240 - protein, 12 aa, Artificial
  Peptide with targeting and/or antimicrobial activity
LSLPLIVLTKSI

SEQ ID NO: 241 - protein, 23 aa, Artificial
  Peptide with targeting and/or antimicrobial activity
FIAVSFTGNPATFKLVIGCKADN

SEQ ID NO: 242 - protein, 22 aa, Artificial
  Peptide with targeting and/or antimicrobial activity
LEGKFYMAEDFDKTPECFKDYV

SEQ ID NO: 243 - protein, 30 aa, Artificial
  Peptide with targeting and/or antimicrobial activity
GMFENLLMINFQIMNDLKIEIVVKDRICAV

SEQ ID NO: 244 - protein, 12 aa, Artificial
  Peptide with targeting and/or antimicrobial activity
RAGTWLVVDEIR

SEQ ID NO: 245 - protein, 26 aa, Artificial
  Peptide with targeting and/or antimicrobial activity
RIKEERKNRSYKFFIWRLFDEKTGFI

SEQ ID NO: 246 - protein, 26 aa, Artificial
  Peptide with targeting and/or antimicrobial activity
PITPKKEKCGLGTYAPKNPVFSKSRV

SEQ ID NO: 247 - protein, 16 aa, Artificial
  Peptide with targeting and/or antimicrobial activity
PLYVAAVEKINTAKKH

SEQ ID NO: 248 - protein, 13 aa, Artificial
  Peptide with targeting and/or antimicrobial activity
VHEFDIQKILQNR

SEQ ID NO: 249 - protein, 29 aa, Artificial
  Peptide with targeting and/or antimicrobial activity
FLIQKFLLIKTFPPYRKKYVVIVSQTGTA

SEQ ID NO: 250 - protein, 31 aa, Artificial
  Peptide with targeting and/or antimicrobial activity
QLAPIDKQLKAVKKIAFYESESTAAKAVTVA

SEQ ID NO: 251 - protein, 31 aa, Artificial
  Peptide with targeting and/or antimicrobial activity
YNEPNYKWLESYKIYKQRCEDRTGMYYTEET

SEQ ID NO: 252 - protein, 26 aa, Artificial
  Peptide with targeting and/or antimicrobial activity
ETTTEINAIKLHRIKQRSPQGTRRVN

SEQ ID NO: 253 - protein, 30 aa, Artificial
  Peptide with targeting and/or antimicrobial activity
QVLKNFSISRRYKINNPFFKILLFIQLRTL

SEQ ID NO: 254 - protein, 24 aa, Artificial
  Peptide with targeting and/or antimicrobial activity
ILTLLILGSIGFFILKIKLKLGRF

SEQ ID NO: 255 - protein, 18 aa, Artificial
  Peptide with targeting and/or antimicrobial activity
IYYMRFVNKPLEKTFFKI

SEQ ID NO: 256 - protein, 26 aa, Artificial
  Peptide with targeting and/or antimicrobial activity
SINSSAGIQPHCLSSSFVLRTKHCFY

SEQ ID NO: 257 - protein, 10 aa, Artificial
  Peptide with targeting and/or antimicrobial activity
FVLRTKHCFY

SEQ ID NO: 258 - protein, 29 aa, Artificial
  Peptide with targeting and/or antimicrobial activity
TNNKNKVIIKAIKFKNKDFINLDLFIYRR

SEQ ID NO: 259 - protein, 28 aa, Artificial
  Peptide with targeting and/or antimicrobial activity
KYEKLTKENLFIRNSGNMCVFIYFLFFG

SEQ ID NO: 260 - protein, 9 aa, Artificial
  Peptide with targeting and/or antimicrobial activity
ISLVFPAYT

SEQ ID NO: 261 - protein, 32 aa, Artificial
  Peptide with targeting and/or antimicrobial activity
LCTKLEDKQRGRIPAELFIISPIKILERNDAL

SEQ ID NO: 262 - protein, 10 aa, Artificial
  Peptide with targeting and/or antimicrobial activity
FQYYFSLKRV

SEQ ID NO: 263 - protein, 31 aa, Artificial
  Peptide with targeting and/or antimicrobial activity
FFPYYLADFYKQLKFLNEYQTKNKDKVVEFK

SEQ ID NO: 264 - protein, 29 aa, Artificial
  Peptide with targeting and/or antimicrobial activity
LGFFNNKADLVKADTERDNRMSSLKIKDL

SEQ ID NO: 265 - protein, 14 aa, Artificial
  Peptide with targeting and/or antimicrobial activity
KGYPLPFQYRLNNH

SEQ ID NO: 266 - protein, 20 aa, Artificial
  Peptide with targeting and/or antimicrobial activity
RWVGGEPSADIYLSAKDTKT

SEQ ID NO: 267 - protein, 15 aa, Artificial
  Peptide with targeting and/or antimicrobial activity
EPSADIYLSAKDTKT

SEQ ID NO: 268 - protein, 18 aa, Artificial
  Peptide with targeting and/or antimicrobial activity
IINQLNLILLRLMEILIL

SEQ ID NO: 269 - protein, 31 aa, Artificial
  Peptide with targeting and/or antimicrobial activity
DMKIIKLYIKILSFLFIKYCNKKLNSVKLKA

SEQ ID NO: 270 - protein, 18 aa, Artificial
  Peptide with targeting and/or antimicrobial activity
IINQLNLILLRLMEILIL

SEQ ID NO: 271 - protein, 32 aa, Artificial
  Peptide with targeting and/or antimicrobial activity
HVEDCFLLSNARTTAIHGRANPARGEPRTRSE

SEQ ID NO: 272 - protein, 17 aa, Artificial
  Peptide with targeting and/or antimicrobial activity
YDKIADGVFKIGKRGVL

SEQ ID NO: 273 - protein, 9 aa, Artificial
  Peptide with targeting and/or antimicrobial activity
KYKLKKIIL

SEQ ID NO: 274 - protein, 20 aa, Artificial
  Peptide with targeting and/or antimicrobial activity
EYSQQSFKAKPCSERGVLSP

SEQ ID NO: 275 - protein, 32 aa, Artificial
  Peptide with targeting and/or antimicrobial activity
RSLRLNNALTKLPKLWYNRIKEAFYAYNDYDK

SEQ ID NO: 276 - protein, 29 aa, Artificial
  Peptide with targeting and/or antimicrobial activity
ILNKKPKLPLWKLGKNYFRRFYVLPTFLA

SEQ ID NO: 277 - protein, 23 aa, Artificial
  Peptide with targeting and/or antimicrobial activity
SMLTSFLRSKNTRSLKMYKDVHF

SEQ ID NO: 278 - protein, 29 aa, Artificial
  Peptide with targeting and/or antimicrobial activity
PLIISKAQIKMSGDILGSCFKLFYLRPFF

SEQ ID NO: 279 - protein, 13 aa, Artificial
  Peptide with targeting and/or antimicrobial activity
SKLPRVLDASLKL

SEQ ID NO: 280 - protein, 15 aa, Artificial
  Peptide with targeting and/or antimicrobial activity
IIIILPKIYLVCKTV

SEQ ID NO: 281 - protein, 14 aa, Artificial
  Peptide with targeting and/or antimicrobial activity
LDYENMDCKKRIRI

SEQ ID NO: 282 - protein, 24 aa, Artificial
  Peptide with targeting and/or antimicrobial activity
STAGEASRRTASEASRRTAAKLRG

SEQ ID NO: 283 - protein, 26 aa, Artificial
  Peptide with targeting and/or antimicrobial activity
ARNALNMRDVPVDAAIIGIIDGMDEE

SEQ ID NO: 284 - protein, 25 aa, Artificial
  Peptide with targeting and/or antimicrobial activity
KILNEAEGKLLKVIEKNGEIDIEEI

SEQ ID NO: 285 - protein, 24 aa, Artificial
  Peptide with targeting and/or antimicrobial activity
NGDKKAKEELDKWDEVIKELNIQF

SEQ ID NO: 286 - protein, 34 aa, Artificial
  Peptide with targeting and/or antimicrobial activity
GLVIIPNLIALIILFSQVRQQTKDYFSNPKLSSR

SEQ ID NO: 287 - protein, 34 aa, Artificial
  Peptide with targeting and/or antimicrobial activity
EPLPLTKYDKKDTEMKKVFKEILAGKVGYEKEEE

SEQ ID NO: 288 - protein, 23 aa, Artificial
  Peptide with targeting and/or antimicrobial activity
TKLKKNNKLLSAKKENTLHTKDK

SEQ ID NO: 289 - protein, 9 aa, Artificial
  Peptide with targeting and/or antimicrobial activity
AIFDAMHNL

SEQ ID NO: 290 - protein, 9 aa, Artificial
  Peptide with targeting and/or antimicrobial activity
  mod_res (1)..(1): D lysine
  mod_res (2)..(2): D ornithine
  mod_res (4)..(4): D threonine
  mod_res (8)..(8): D serine
  mod_res (9)..(9): D ornithine
XXGXTQGXX

SEQ ID NO: 291 - protein, 8 aa, Artificial
  Peptide with targeting and/or antimicrobial activity
  mod_res (2)..(2): D ornithine
  mod_res (7)..(7): D ornithine
DXKTAAXK

SEQ ID NO: 292 - protein, 9 aa, Artificial
  Peptide with targeting and/or antimicrobial activity
  mod_res (3)..(3): D Asp
  mod_res (5)..(5): D Thr
  mod_res (6)..(6): D Ala
  mod_res (8)..(8): D Lys
  mod_res (9)..(9): D ornithine
DKXSXXTXX

SEQ ID NO: 293 - protein, 10 aa, Artificial
  Peptide with targeting and/or antimicrobial activity
  mod_res (1)..(1): D Ser
  mod_res (4)..(4): D Ser
  mod_res (6)..(6): D Ser
  mod_res (7)..(7): D ornithine
  mod_res (9)..(9): D Ser
  mod_res (10)..(10): D Ser
XKSXTXXTXX

SEQ ID NO: 294 - protein, 8 aa, Artificial
  Peptide with targeting and/or antimicrobial activity
  mod_res (1)..(1): D Ser
  mod_res (3)..(3): D Ser
  mod_res (4)..(4): Ornithine
  mod_res (6)..(6): Ornithine
XRXXKXTT

SEQ ID NO: 295 - protein, 7 aa, Artificial
  Peptide with targeting and/or antimicrobial activity
  mod_res (1)..(1): D Ser
  mod_res (2)..(2): D aminobutyric acid
  mod_res (3)..(3): Ornithine
  mod_res (4)..(4): D Gln
  mod_res (6)..(6): D ornithine
XXXXQXG

SEQ ID NO: 296 - protein, 7 aa, Artificial
  Peptide with targeting and/or antimicrobial activity
  mod_res (1)..(1): D Ser
  mod_res (2)..(2): D ornithine
  mod_res (3)..(3): Ornithine
  mod_res (5)..(5): D Thr
  mod_res (7)..(7): Ornithine
XXXGXSX

SEQ ID NO: 297 - protein, 6 aa, Artificial
  Peptide with targeting and/or antimicrobial activity
  mod_res (1)..(1): D Ala
  mod_res (4)..(4): D Ser
  mod_res (5)..(6): Ornithine
XKTXXX

SEQ ID NO: 298 - protein, 9 aa, Artificial
  Peptide with targeting and/or antimicrobial activity
  mod_res (1)..(1): D Ser
  mod_res (2)..(2): D ornithine
  mod_res (4)..(4): D Thr
  mod_res (8)..(8): D Ser
  mod_res (9)..(9): D ornithine
XXGXTQGXX

SEQ ID NO: 299 - protein, 6 aa, Artificial
  Peptide with targeting and/or antimicrobial activity
  mod_res (2)..(2): D Asp
  mod_res (4)..(4): D Thr
  mod_res (6)..(6): D ornithine
KXAXAX

SEQ ID NO: 300 - protein, 8 aa, Artificial
  Peptide with targeting and/or antimicrobial activity
  mod_res (2)..(2): D ornithine
  mod_res (5)..(5): D Ala
  misc_feature (6)..(6): Xaa can be any naturally occurring amino acid
  mod_res (7)..(7): D ornithine
NXKTXXXK

SEQ ID NO: 301 - protein, 12 aa, Artificial
  Peptide with targeting and/or antimicrobial activity
  mod_res (1)..(1): D Ala
  mod_res (6)..(6): D Gln
  mod_res (7)..(7): D Ser
  mod_res (9)..(10): D Ala
  mod_res (12)..(12): Ornithine
XKGGDXXAXXAX

SEQ ID NO: 302 - protein, 11 aa, Artificial
  Peptide with targeting and/or antimicrobial activity
  mod_res (1)..(1): D Ser
  mod_res (4)..(4): Ornithine
  mod_res (5)..(5): D Ser
  mod_res (9)..(9): D ornithine
XKGXXSGKXES

SEQ ID NO: 303 - protein, 10 aa, Artificial
  Peptide with targeting and/or antimicrobial activity
  mod_res (1)..(1): D Ser
  mod_res (2)..(2): D aminobutyric acid
  mod_res (8)..(8): D Ala
  mod_res (10)..(10): Ornithine
XXGSDAGXGX

SEQ ID NO: 304 - protein, 7 aa, Artificial
  Peptide with targeting and/or antimicrobial activity
  mod_res (4)..(4): Ornithine
  mod_res (6)..(6): D ornithine
SKGXKXS

SEQ ID NO: 305 - protein, 10 aa, Artificial
  Peptide with targeting and/or antimicrobial activity
  mod_res (1)..(1): D Ala
  mod_res (2)..(2): D Lys
  mod_res (6)..(6): D Gln
  mod_res (7)..(7): D aminobutyric acid
  mod_res (9)..(9): D Ala
  mod_res (10)..(10): Ornithine
XXGGDXXSXX

SEQ ID NO: 306 - protein, 11 aa, Artificial
  Peptide with targeting and/or antimicrobial activity
  mod_res (1)..(1): D Ala
  mod_res (2)..(2): D Lys
  mod_res (5)..(5): D Asp
  mod_res (6)..(6): D Gln
  mod_res (7)..(7): D Ser
  mod_res (10)..(10): D Thr
  mod_res (11)..(11): Ornithine
XXGGXXXAGXX

SEQ ID NO: 307 - protein, 6 aa, Artificial
  Peptide with targeting and/or antimicrobial activity
  mod_res (1)..(1): D Ser
  mod_res (4)..(4): D Thr
  mod_res (6)..(6): Ornithine
XKHXSX

SEQ ID NO: 308 - protein, 8 aa, Artificial
  Peptide with targeting and/or antimicrobial activity
  mod_res (1)..(1): D Ser
  mod_res (2)..(2): D Ala
  mod_res (3)..(3): D Orn
  mod_res (5)..(5): D Ser
  mod_res (6)..(6): D Asp
  mod_res (7)..(7): D Ser
  mod_res (8)..(8): D Thr
XXXGXXXX

SEQ ID NO: 309 - protein, 10 aa, Artificial
  Peptide with targeting and/or antimicrobial activity
  mod_res (1)..(1): D Ala
  mod_res (2)..(2): D Lys
  mod_res (6)..(6): D Gln
  mod_res (7)..(7): D aminobutyric acid
  mod_res (10)..(10): Orn
XXGGDXXGSX

SEQ ID NO: 310 - protein, 10 aa, Artificial
  Peptide with targeting and/or antimicrobial activity
  mod_res (1)..(1): D Ser
  mod_res (4)..(4): Orn
  mod_res (6)..(6): D Ser
  mod_res (9)..(9): D Orn
XKGXSXGKXS

SEQ ID NO: 311 - protein, 7 aa, Artificial
  Peptide with targeting and/or antimicrobial activity
  mod_res (1)..(1): D Ser
  mod_res (2)..(2): D Orn
  mod_res (5)..(5): D Thr
  mod_res (7)..(7): Orn
XXAGXAX

SEQ ID NO: 312 - protein, 7 aa, Artificial
  Peptide with targeting and/or antimicrobial activity
  mod_res (1)..(1): D Lys
  mod_res (2)..(2): D Orn
  mod_res (5)..(5): D Thr
  mod_res (7)..(7): Orn
XXAGXSX

SEQ ID NO: 313 - protein, 9 aa, Artificial
  Peptide with targeting and/or antimicrobial activity
  mod_res (1)..(2): D Ser
  mod_res (3)..(3): Orn
  mod_res (4)..(6): D Ser
  mod_res (7)..(7): Orn
XXXXXXXKK

SEQ ID NO: 314 - protein, 9 aa, Artificial
  Peptide with targeting and/or antimicrobial activity
  mod_res (4)..(4): D Ser
  mod_res (6)..(6): D Ala
  mod_res (7)..(7): D Glu
  mod_res (8)..(8): D Ser
  mod_res (9)..(9): Orn
DKDXTXXXX

SEQ ID NO: 315 - protein, 10 aa, Artificial
  Peptide with targeting and/or antimicrobial activity
  mod_res (3)..(3): D Ser
  mod_res (4)..(4): Orn
  mod_res (6)..(6): D Gln
  mod_res (7)..(7): D aminobutyric acid
  mod_res (9)..(9): D Thr
  mod_res (10)..(10): Orn
STXXDXXSXX

SEQ ID NO: 316 - protein, 9 aa, Artificial
  Peptide with targeting and/or antimicrobial activity
  mod_res (2)..(2): D Orn
  mod_res (3)..(3): D aminobutyric acid
  mod_res (6)..(6): D Ser
DXXTGXSDT

SEQ ID NO: 317 - protein, 7 aa, Artificial
  Peptide with targeting and/or antimicrobial activity
  mod_res (2)..(2): Orn
  mod_res (3)..(3): D Asp
  mod_res (4)..(4): D aminobutyric acid
  mod_res (7)..(7): Orn
DXXXGSX

SEQ ID NO: 318 - protein, 9 aa, Artificial
  Peptide with targeting and/or antimicrobial activity
  mod_res (2)..(2): D Orn
  mod_res (3)..(3): D aminobutyric acid
  mod_res (6)..(7): D Ser
DXXTGXXTD

SEQ ID NO: 319 - protein, 8 aa, Artificial
  Peptide with targeting and/or antimicrobial activity
  mod_res (1)..(1): D Ser
  mod_res (2)..(2): D Ala
  mod_res (3)..(3): D Orn
  mod_res (5)..(5): D Ala
  mod_res (6)..(6): D Asp
  mod_res (7)..(7): DSer
  mod_res (8)..(8): D Thr
XXXGXXXX

SEQ ID NO: 320 - protein, 6 aa, Artificial
  Peptide with targeting and/or antimicrobial activity
  mod_res (4)..(4): D Orn
  mod_res (6)..(6): Orn
DADXSX

SEQ ID NO: 321 - protein, 10 aa, Artificial
  Peptide with targeting and/or antimicrobial activity
  mod_res (1)..(1): D Ser
  mod_res (4)..(4): D Ser
  mod_res (6)..(6): D Ser
  mod_res (7)..(7): Orn
  mod_res (9)..(9): D Ser
  mod_res (10)..(10): Orn
XKSXTXXTXX

SEQ ID NO: 322 - protein, 8 aa, Artificial
  Peptide with targeting and/or antimicrobial activity
  mod_res (1)..(1): D Ser
  mod_res (2)..(2): D Asp
  mod_res (3)..(3): D Thr
  mod_res (4)..(4): D Ser
  mod_res (5)..(5): D Orn
  mod_res (8)..(8): D Ser
XXXXXAGX

SEQ ID NO: 323 - protein, 8 aa, Artificial
  Peptide with targeting and/or antimicrobial activity
  mod_res (1)..(1): D Ser
  mod_res (2)..(2): D Ala
  mod_res (4)..(4): D Ser
  mod_res (5)..(5): D Ala
  mod_res (6)..(6): D Asp
  mod_res (7)..(7): D Thr
  mod_res (8)..(8): D Orn
XXGXXXXX

SEQ ID NO: 324 - protein, 6 aa, Artificial
  Peptide with targeting and/or antimicrobial activity
  mod_res (1)..(1): Hse
  mod_res (2)..(2): D Hse
  mod_res (3)..(3): Dab
  mod_res (4)..(4): D Orn
  mod_res (5)..(5): D Ser
  mod_res (6)..(6): Orn
XXXXXX

SEQ ID NO: 325 - protein, 23 aa, Artificial
  Peptide with targeting and/or antimicrobial activity
SKRGRKRKDRRKKKANHGKRPNS

SEQ ID NO: 326 - protein, 30 aa, Artificial
  Peptide with targeting and/or antimicrobial activity
MNNWIIVAQLSVTVINEIIDIMKEKQKGGK

SEQ ID NO: 327 - protein, 5 aa, Artificial
  Peptide with targeting and/or antimicrobial activity
NDDAQ

SEQ ID NO: 328 - protein, 30 aa, Artificial
  Peptide with targeting and/or antimicrobial activity
MNNWIKVAQISVTVINEVIDIMKEKQNGGK

SEQ ID NO: 329 - protein, 23 aa, Artificial
  Peptide with targeting and/or antimicrobial activity
ARLSKAIIIAVIVVYHLDVRGLF

SEQ ID NO: 330 - protein, 30 aa, Artificial
  Peptide with targeting and/or antimicrobial activity
MESIFKIKLMNGICRSENMNMKKKNKGEKI

SEQ ID NO: 331 - protein, 21 aa, Artificial
  Peptide with targeting and/or antimicrobial activity
MGIIAGIIKFIKGLIEKFTGK

SEQ ID NO: 332 - protein, 21 aa, Artificial
  Peptide with targeting and/or antimicrobial activity
MGIIAGIIKVIKSLIEQFTGK

SEQ ID NO: 333 - protein, 26 aa, Artificial
  Peptide with targeting and/or antimicrobial activity
MIEIGSIAYLNGGSKKYNHILNQENR

SEQ ID NO: 334 - protein, 13 aa, Artificial
  Peptide with targeting and/or antimicrobial activity
SKKYNHILNQENR

SEQ ID NO: 335 - protein, 26 aa, Artificial
  Peptide with targeting and/or antimicrobial activity
MDIDVNKLLQAFVYFKSFEKLRHNNS

SEQ ID NO: 336 - protein, 30 aa, Artificial
  Peptide with targeting and/or antimicrobial activity
MFCYYKQHKGDNFSIEEVKNIIADNEMKVN

SEQ ID NO: 337 - protein, 24 aa, Artificial
  Peptide with targeting and/or antimicrobial activity
WRGPNTEAGGKSANNIVQVGGAPT

SEQ ID NO: 338 - protein, 23 aa, Artificial
  Peptide with targeting and/or antimicrobial activity
LIQKGLNQTFIVVIRLNNFIKKS

SEQ ID NO: 339 - protein, 8 aa, Artificial
  Peptide with targeting and/or antimicrobial activity
HPTDNKHN

SEQ ID NO: 340 - protein, 14 aa, Artificial
  Peptide with targeting and/or antimicrobial activity
SIDKRNLYNLKYYE

SEQ ID NO: 341 - protein, 13 aa, Artificial
  Peptide with targeting and/or antimicrobial activity
RKQYDDLSFNFLY

SEQ ID NO: 342 - protein, 5 aa, Artificial
  Peptide with targeting and/or antimicrobial activity
ESIIE

SEQ ID NO: 343 - protein, 9 aa, Artificial
  Peptide with targeting and/or antimicrobial activity
YYKTYFKEV

SEQ ID NO: 344 - protein, 30 aa, Artificial
  Peptide with targeting and/or antimicrobial activity
MKIILLLFLIFGFIVVVTLKSEHQLTLFSI

SEQ ID NO: 345 - protein, 14 aa, Artificial
  Peptide with targeting and/or antimicrobial activity
FSLNFSKQKYVTVN

SEQ ID NO: 346 - protein, 24 aa, Artificial
  Peptide with targeting and/or antimicrobial activity
MINELKNKNSGIMNNYVVTKESKL

SEQ ID NO: 347 - protein, 30 aa, Artificial
  Peptide with targeting and/or antimicrobial activity
MTKNTIISLENEKTQINDSENESSDLRKAK

SEQ ID NO: 348 - protein, 6 aa, Artificial
  Peptide with targeting and/or antimicrobial activity
DLRKAK

SEQ ID NO: 349 - protein, 17 aa, Artificial
  Peptide with targeting and/or antimicrobial activity
LLIIFRLWLELKWKNKK

SEQ ID NO: 350 - protein, 6 aa, Artificial
  Peptide with targeting and/or antimicrobial activity
SIHFIN

SEQ ID NO: 351 - protein, 25 aa, Artificial
  Peptide with targeting and/or antimicrobial activity
HNARKYLEFISQKIDGDKLTKEDSL

SEQ ID NO: 352 - protein, 25 aa, Artificial
  Peptide with targeting and/or antimicrobial activity
ALDCSEQSVILWYETILDKIVGVIK

SEQ ID NO: 353 - protein, 5 aa, Artificial
  Peptide with targeting and/or antimicrobial activity
NSTNE

SEQ ID NO: 354 - protein, 16 aa, Artificial
  Peptide with targeting and/or antimicrobial activity
MTCHQAPTTTHQSNMA

SEQ ID NO: 355 - protein, 30 aa, Artificial
  Peptide with targeting and/or antimicrobial activity
MPHHSTTSSRIVVPAHQSNMASTPNLSITP

SEQ ID NO: 356 - protein, 30 aa, Artificial
  Peptide with targeting and/or antimicrobial activity
MFIFKTTSKSHFHNNVKSLECIKIPINKNR

SEQ ID NO: 357 - protein, 17 aa, Artificial
  Peptide with targeting and/or antimicrobial activity
EPKKKHFPKMESASSEP

SEQ ID NO: 358 - protein, 6 aa, Artificial
  Peptide with targeting and/or antimicrobial activity
SFYESY

SEQ ID NO: 359 - protein, 21 aa, Artificial
  Peptide with targeting and/or antimicrobial activity
ILNRLSRIVSNEVTSLIYSLK

SEQ ID NO: 360 - protein, 30 aa, Artificial
  Peptide with targeting and/or antimicrobial activity
MTKKRRYDTTEFGLAHSMTAKITLHQALYK

SEQ ID NO: 361 - protein, 19 aa, Artificial
  Peptide with targeting and/or antimicrobial activity
MAYKDEGKETKFAVKGYKD

SEQ ID NO: 362 - protein, 9 aa, Artificial
  Peptide with targeting and/or antimicrobial activity
MLEEKNKSL

SEQ ID NO: 363 - protein, 30 aa, Artificial
  Peptide with targeting and/or antimicrobial activity
MIHLTKQNTMEALHFIKQFYDMFFILNFNV

SEQ ID NO: 364 - protein, 10 aa, Artificial
  Peptide with targeting and/or antimicrobial activity
ELLVILPGFI

SEQ ID NO: 365 - protein, 17 aa, Artificial
  Peptide with targeting and/or antimicrobial activity
LLLSYFRYTGALLQSLF

SEQ ID NO: 366 - protein, 22 aa, Artificial
  Peptide with targeting and/or antimicrobial activity
MIKNETAYQMNELLVIRSAYAK

SEQ ID NO: 367 - protein, 10 aa, Artificial
  Peptide with targeting and/or antimicrobial activity
KLKKYIHKPD

SEQ ID NO: 368 - protein, 10 aa, Artificial
  Peptide with targeting and/or antimicrobial activity
LDINDYRSTY

SEQ ID NO: 369 - protein, 13 aa, Artificial
  Peptide with targeting and/or antimicrobial activity
LDFYLTKHLTLML

SEQ ID NO: 370 - protein, 17 aa, Artificial
  Peptide with targeting and/or antimicrobial activity
NQEPSLQQDKEQKDNKG

SEQ ID NO: 371 - protein, 20 aa, Artificial
  Peptide with targeting and/or antimicrobial activity
LYFAFKKYQERVNQAPNIEY

SEQ ID NO: 372 - protein, 12 aa, Artificial
  Peptide with targeting and/or antimicrobial activity
AYYLKRREEKGK

SEQ ID NO: 373 - protein, 12 aa, Artificial
  Peptide with targeting and/or antimicrobial activity
SYYLKRREEKGK

SEQ ID NO: 374 - protein, 25 aa, Artificial
  Peptide with targeting and/or antimicrobial activity
RFFNFEIKKSTKVDYVFAHVDLSDV

SEQ ID NO: 375 - protein, 15 aa, Artificial
  Peptide with targeting and/or antimicrobial activity
QELINEAVNLLVKSK

SEQ ID NO: 376 - protein, 38 aa, Artificial
  Peptide with targeting and/or antimicrobial activity
KLFGQWGPELGSIYILPALIGSIILIAIVTLILRAMRK

SEQ ID NO: 377 - protein, 21 aa, Artificial
  Peptide with targeting and/or antimicrobial activity
VSISRFIGGGHVFNGNNKRNL

SEQ ID NO: 378 - protein, 12 aa, Artificial
  Peptide with targeting and/or antimicrobial activity
GHVFNGNNKRNL

SEQ ID NO: 379 - protein, 40 aa, Artificial
  Peptide with targeting and/or antimicrobial activity
AEQLFGKQKQRGVDLFLNRLTIILSILFFVLMICISYLGM

SEQ ID NO: 380 - protein, 22 aa, Artificial
  Peptide with targeting and/or antimicrobial activity
TMIVISIPRFEEYMKARHKKWM

SEQ ID NO: 381 - protein, 9 aa, Artificial
  Peptide with targeting and/or antimicrobial activity
FADQSQDNA

SEQ ID NO: 382 - protein, 5 aa, Artificial
  Peptide with targeting and/or antimicrobial activity
HSSHL

SEQ ID NO: 383 - protein, 24 aa, Artificial
  Peptide with targeting and/or antimicrobial activity
GYNSYKAVQDVKTHSEEQRVTAKK

SEQ ID NO: 384 - protein, 32 aa, Artificial
  Peptide with targeting and/or antimicrobial activity
MKKKRINNDILGRMIYSSSIDKRNLYNLKYYE

SEQ ID NO: 385 - protein, 26 aa, Artificial
  Peptide with targeting and/or antimicrobial activity
IAAIIVLVLFQKGLLQIFNWILIQLQ

SEQ ID NO: 386 - protein, 6 aa, Artificial
  Peptide with targeting and/or antimicrobial activity
DYYGKE

SEQ ID NO: 387 - protein, 35 aa, Artificial
  Peptide with targeting and/or antimicrobial activity
LEKNTRDNYFIHAIDRIYINTSKGLFPESELVAWG

SEQ ID NO: 388 - protein, 37 aa, Artificial
  Peptide with targeting and/or antimicrobial activity
IKGTVKAVDETTVVITVNGHGTELTFEKPAIKQVDPS

SEQ ID NO: 389 - protein, 30 aa, Artificial
  Peptide with targeting and/or antimicrobial activity
DLIVKVHICFVVKTASGYCYLNKREAQAAI

SEQ ID NO: 390 - protein, 37 aa, Artificial
  Peptide with targeting and/or antimicrobial activity
SHLINNFGLSVINPSTPICLNFSPVFNLLTVYGITCN

SEQ ID NO: 391 - protein, 21 aa, Artificial
  Peptide with targeting and/or antimicrobial activity
FDPVPLKKDKSASKHSHKHNH

SEQ ID NO: 392 - protein, 18 aa, Artificial
  Peptide with targeting and/or antimicrobial activity
SMVKSEIVDLLNGEDNDD

SEQ ID NO: 393 - protein, 30 aa, Artificial
  Peptide with targeting and/or antimicrobial activity
HCVIGNVVDIANLLKRRAVYRDIADVIKMR

SEQ ID NO: 394 - protein, 36 aa, Artificial
  Peptide with targeting and/or antimicrobial activity
CPSVTMDACALLQKFDFCNNISHFRHFFAIKQPIER

SEQ ID NO: 395 - protein, 12 aa, Artificial
  Peptide with targeting and/or antimicrobial activity
RDIHPIYFMTKD

SEQ ID NO: 396 - protein, 28 aa, Artificial
  Peptide with targeting and/or antimicrobial activity
FVNSLIMKDLSDNDMRFKYEYYNREKDT

SEQ ID NO: 397 - protein, 27 aa, Artificial
  Peptide with targeting and/or antimicrobial activity
LYQYELLSKEEYLKCTLIINQRRNEQK

SEQ ID NO: 398 - protein, 22 aa, Artificial
  Peptide with targeting and/or antimicrobial activity
QPTQGEQGTRPRRPTPMRGLLI

SEQ ID NO: 399 - protein, 13 aa, Artificial
  Peptide with targeting and/or antimicrobial activity
EIIAYLEGRFANA

SEQ ID NO: 400 - protein, 21 aa, Artificial
  Peptide with targeting and/or antimicrobial activity
DPVPERQEQACACHRTAKPGK

SEQ ID NO: 401 - protein, 10 aa, Artificial
  Peptide with targeting and/or antimicrobial activity
ERTAVNDLWI

SEQ ID NO: 402 - protein, 28 aa, Artificial
  Peptide with targeting and/or antimicrobial activity
TTRPQVAEDRQLDDALKETFPASDPISP

SEQ ID NO: 403 - protein, 38 aa, Artificial
  Peptide with targeting and/or antimicrobial activity
MADGQIAAIAKLHGVPVATRNIRHFQSFGVELINPWSG

SEQ ID NO: 404 - protein, 22 aa, Artificial
  Peptide with targeting and/or antimicrobial activity
YVVGALVILAVAGLIYSMLRKA

SEQ ID NO: 405 - protein, 34 aa, Artificial
  Peptide with targeting and/or antimicrobial activity
FSPEAFGIGAAGVLGSFVTGLLIGWVASLLRKAK

SEQ ID NO: 406 - protein, 30 aa, Artificial
  Peptide with targeting and/or antimicrobial activity
MLRYLSLFAVGLATGYAWGWIDGLAASLAV

SEQ ID NO: 407 - protein, 24 aa, Artificial
  Peptide with targeting and/or antimicrobial activity
GIKVVAARFEEIQFSENFDSIILA

SEQ ID NO: 408 - protein, 17 aa, Artificial
  Peptide with targeting and/or antimicrobial activity
MKLLARDPWVCAWNDIW

SEQ ID NO: 409 - protein, 17 aa, Artificial
  Peptide with targeting and/or antimicrobial activity
LQRSDEESMPRRHEKYS

SEQ ID NO: 410 - protein, 12 aa, Artificial
  Peptide with targeting and/or antimicrobial activity
RRAAARTKGNRR

SEQ ID NO: 411 - protein, 13 aa, Artificial
  Peptide with targeting and/or antimicrobial activity
RPGDGAAEQGRSR

SEQ ID NO: 412 - protein, 13 aa, Artificial
  Peptide with targeting and/or antimicrobial activity
GDPTAGQKPVECP

SEQ ID NO: 413 - protein, 12 aa, Artificial
  Peptide with targeting and/or antimicrobial activity
GKAMKRQDCSAL

SEQ ID NO: 414 - protein, 24 aa, Artificial
  Peptide with targeting and/or antimicrobial activity
PPARPARIPQTPTLHGASLFRQRS

SEQ ID NO: 415 - protein, 15 aa, Artificial
  Peptide with targeting and/or antimicrobial activity
LRGRVGRITACGYPP

SEQ ID NO: 416 - protein, 27 aa, Artificial
  Peptide with targeting and/or antimicrobial activity
VLGKGHDLLDVGKTALKSRVFAWLGGS

SEQ ID NO: 417 - protein, 9 aa, Artificial
  Peptide with targeting and/or antimicrobial activity
AVHHSLLFR

SEQ ID NO: 418 - protein, 19 aa, Artificial
  Peptide with targeting and/or antimicrobial activity
ALSKPAIQARTLCRRQDPP

SEQ ID NO: 419 - protein, 27 aa, Artificial
  Peptide with targeting and/or antimicrobial activity
FHRRVIRASEWALTTRSFSTPLRSAAR

SEQ ID NO: 420 - protein, 8 aa, Artificial
  Peptide with targeting and/or antimicrobial activity
VVRRFQGM

SEQ ID NO: 421 - protein, 10 aa, Artificial
  Peptide with targeting and/or antimicrobial activity
GIDRGCQAAR

SEQ ID NO: 422 - protein, 22 aa, Artificial
  Peptide with targeting and/or antimicrobial activity
LSPRPIIVSRRSRADNNNDWSR

SEQ ID NO: 423 - protein, 16 aa, Artificial
  Peptide with targeting and/or antimicrobial activity
RSGQPVGRPSRRAWLR

SEQ ID NO: 424 - protein, 24 aa, Artificial
  Peptide with targeting and/or antimicrobial activity
GIVLTGRAGLVSGACSMALGVGLG

SEQ ID NO: 425 - protein, 17 aa, Artificial
  Peptide with targeting and/or antimicrobial activity
GCGKRRIITKSASRDTR

SEQ ID NO: 426 - protein, 17 aa, Artificial
  Peptide with targeting and/or antimicrobial activity
RRPRRRRSGHGQSASAA

SEQ ID NO: 427 - protein, 25 aa, Artificial
  Peptide with targeting and/or antimicrobial activity
RRGCTERLRRMARRNAWDLYAEHFY

SEQ ID NO: 428 - protein, 20 aa, Artificial
  Peptide with targeting and/or antimicrobial activity
GKVSVLTRVPRSLGGAPANQ

SEQ ID NO: 429 - protein, 8 aa, Artificial
  Peptide with targeting and/or antimicrobial activity
EIQAKGTG

SEQ ID NO: 430 - protein, 20 aa, Artificial
  Peptide with targeting and/or antimicrobial activity
EEYPARVPLSGEDVTEARRH

SEQ ID NO: 431 - protein, 14 aa, Artificial
  Peptide with targeting and/or antimicrobial activity
VGYFIWKDSHSRKG

SEQ ID NO: 432 - protein, 12 aa, Artificial
  Peptide with targeting and/or antimicrobial activity
GILARADCSQIA

SEQ ID NO: 433 - protein, 22 aa, Artificial
  Peptide with targeting and/or antimicrobial activity
GIKKSKHPSTDDYVVKTTIDSL

SEQ ID NO: 434 - protein, 15 aa, Artificial
  Peptide with targeting and/or antimicrobial activity
GRYGDDSKERQGRAQ

SEQ ID NO: 435 - protein, 15 aa, Artificial
  Peptide with targeting and/or antimicrobial activity
LITAEQPATAPIAGK

SEQ ID NO: 436 - protein, 22 aa, Artificial
  Peptide with targeting and/or antimicrobial activity
HTAVVWLAGVSGCVALSHCEPA

SEQ ID NO: 437 - protein, 12 aa, Artificial
  Peptide with targeting and/or antimicrobial activity
VRLESRPADLPE

SEQ ID NO: 438 - protein, 20 aa, Artificial
  Peptide with targeting and/or antimicrobial activity
TMAFVEKAQLRVPVGDDLPV

SEQ ID NO: 439 - protein, 17 aa, Artificial
  Peptide with targeting and/or antimicrobial activity
SFHASLTKNEKPIKSTG

SEQ ID NO: 440 - protein, 18 aa, Artificial
  Peptide with targeting and/or antimicrobial activity
RGRALASTATTRPARRRR

SEQ ID NO: 441 - protein, 23 aa, Artificial
  Peptide with targeting and/or antimicrobial activity
GIRRLHSVENLNREISHRMAGLR

SEQ ID NO: 442 - protein, 26 aa, Artificial
  Peptide with targeting and/or antimicrobial activity
TSWLRAAERQEIGEPTKTFGEKTTSL

SEQ ID NO: 443 - protein, 19 aa, Artificial
  Peptide with targeting and/or antimicrobial activity
EEVSRALAGIGLGLGCRIG

SEQ ID NO: 444 - protein, 28 aa, Artificial
  Peptide with targeting and/or antimicrobial activity
GPVSVVASLRRGTTVQRHSQNNHNKGKP

SEQ ID NO: 445 - protein, 10 aa, Artificial
  Peptide with targeting and/or antimicrobial activity
SKAVSRKRSI

SEQ ID NO: 446 - protein, 20 aa, Artificial
  Peptide with targeting and/or antimicrobial activity
AIEGVIKKGACFKLLRHEMF

SEQ ID NO: 447 - protein, 28 aa, Artificial
  Peptide with targeting and/or antimicrobial activity
VLPFPAIPLSRRRACVAAPRPRSRQRAS

SEQ ID NO: 448 - protein, 15 aa, Artificial
  Peptide with targeting and/or antimicrobial activity
APGSAADSPRSRADD

SEQ ID NO: 449 - protein, 15 aa, Artificial
  Peptide with targeting and/or antimicrobial activity
RLARGRPTNLCGRRG

SEQ ID NO: 450 - protein, 9 aa, Artificial
  Peptide with targeting and/or antimicrobial activity
TQVTLCRTW

SEQ ID NO: 451 - protein, 21 aa, Artificial
  Peptide with targeting and/or antimicrobial activity
LTGVRRPWRAPWAGTSGWALR

SEQ ID NO: 452 - protein, 11 aa, Artificial
  Peptide with targeting and/or antimicrobial activity
AGRTAIVQGGG

SEQ ID NO: 453 - protein, 20 aa, Artificial
  Peptide with targeting and/or antimicrobial activity
RGGDSPARRRPGLAGPGGPG

SEQ ID NO: 454 - protein, 19 aa, Artificial
  Peptide with targeting and/or antimicrobial activity
RRRPAGQRPEKASQAMIAA

SEQ ID NO: 455 - protein, 19 aa, Artificial
  Peptide with targeting and/or antimicrobial activity
RLTSNQFLTRITPFVFAQH

SEQ ID NO: 456 - protein, 21 aa, Artificial
  Peptide with targeting and/or antimicrobial activity
VTSEPGIAHDIRLLPRAAAFR

SEQ ID NO: 457 - protein, 17 aa, Artificial
  Peptide with targeting and/or antimicrobial activity
EVYSSPTNNVAITVQNN

SEQ ID NO: 458 - protein, 13 aa, Artificial
  Peptide with targeting and/or antimicrobial activity
SGLGDLGFSSEAK

SEQ ID NO: 459 - protein, 15 aa, Artificial
  Peptide with targeting and/or antimicrobial activity
GIAPRRNEWGAVGGR

SEQ ID NO: 460 - protein, 18 aa, Artificial
  Peptide with targeting and/or antimicrobial activity
LPATRDKTRVPASVAGAP

SEQ ID NO: 461 - protein, 10 aa, Artificial
  Peptide with targeting and/or antimicrobial activity
KPGISVENRQ

SEQ ID NO: 462 - protein, 9 aa, Artificial
  Peptide with targeting and/or antimicrobial activity
LIADRHIRA

SEQ ID NO: 463 - protein, 20 aa, Artificial
  Peptide with targeting and/or antimicrobial activity
RPAQARQGPGGLIADRHIRA

SEQ ID NO: 464 - protein, 20 aa, Artificial
  Peptide with targeting and/or antimicrobial activity
DADKNLSLERDRFAWRVAAP

SEQ ID NO: 465 - protein, 26 aa, Artificial
  Peptide with targeting and/or antimicrobial activity
EIQKIAKGVSGQVYGPSRQITISKKR

SEQ ID NO: 466 - protein, 22 aa, Artificial
  Peptide with targeting and/or antimicrobial activity
ARTFAGRLGTRYFGGLMRSTKA

SEQ ID NO: 467 - protein, 14 aa, Artificial
  Peptide with targeting and/or antimicrobial activity
GNLTRSREAARATQ

SEQ ID NO: 468 - protein, 23 aa, Artificial
  Peptide with targeting and/or antimicrobial activity
HFILRKPLLFMIHSLKTGPLDRF

SEQ ID NO: 469 - protein, 21 aa, Artificial
  Peptide with targeting and/or antimicrobial activity
QFCNFAWLFLASNNAQVSALA

SEQ ID NO: 470 - protein, 11 aa, Artificial
  Peptide with targeting and/or antimicrobial activity
VEEDEAPPPHY

SEQ ID NO: 471 - protein, 14 aa, Artificial
  Peptide with targeting and/or antimicrobial activity
PPHCPPGHAKKGWC

SEQ ID NO: 472 - protein, 21 aa, Artificial
  Peptide with targeting and/or antimicrobial activity
MKGNKLATAHEQPVKNSAPPL

SEQ ID NO: 473 - protein, 18 aa, Artificial
  Peptide with targeting and/or antimicrobial activity
EMAEGSADDRLRKTPRDC

SEQ ID NO: 474 - protein, 20 aa, Artificial
  Peptide with targeting and/or antimicrobial activity
TTARYIRRQCHTSITPLSQG

SEQ ID NO: 475 - protein, 14 aa, Artificial
  Peptide with targeting and/or antimicrobial activity
CNALLRRGHPPSAL

SEQ ID NO: 476 - protein, 18 aa, Artificial
  Peptide with targeting and/or antimicrobial activity
GIELKSLIMAQIERWRQA

SEQ ID NO: 477 - protein, 15 aa, Artificial
  Peptide with targeting and/or antimicrobial activity
GCRPASLSDADPDGR

SEQ ID NO: 478 - protein, 13 aa, Artificial
  Peptide with targeting and/or antimicrobial activity
ALNRASLRLALGE

SEQ ID NO: 479 - protein, 9 aa, Artificial
  Peptide with targeting and/or antimicrobial activity
SWKCHHLAI

SEQ ID NO: 480 - protein, 23 aa, Artificial
  Peptide with targeting and/or antimicrobial activity
ALQKQDMNLPSVKNQLVFLKSTG

SEQ ID NO: 481 - protein, 16 aa, Artificial
  Peptide with targeting and/or antimicrobial activity
AGVLETPRCRGEYGAN

SEQ ID NO: 482 - protein, 24 aa, Artificial
  Peptide with targeting and/or antimicrobial activity
KLRSASKKSLQEKSCGIMPEKPAG

SEQ ID NO: 483 - protein, 18 aa, Artificial
  Peptide with targeting and/or antimicrobial activity
AAGCRDLGSLSSLVTNPS

SEQ ID NO: 484 - protein, 23 aa, Artificial
  Peptide with targeting and/or antimicrobial activity
DAYHCHLVRSPDAHDLSMRIGFV

SEQ ID NO: 485 - protein, 8 aa, Artificial
  Peptide with targeting and/or antimicrobial activity
NYAVVSHT

SEQ ID NO: 486 - protein, 12 aa, Artificial
  Peptide with targeting and/or antimicrobial activity
EREDGCDAMPLP

SEQ ID NO: 487 - protein, 26 aa, Artificial
  Peptide with targeting and/or antimicrobial activity
DSFDSLSPFRERGGEREDGCDAMPLP

SEQ ID NO: 488 - protein, 7 aa, Artificial
  Peptide with targeting and/or antimicrobial activity
NDSKASN

SEQ ID NO: 489 - protein, 12 aa, Artificial
  Peptide with targeting and/or antimicrobial activity
MTTGVDFIIEKV

SEQ ID NO: 490 - protein, 23 aa, Artificial
  Peptide with targeting and/or antimicrobial activity
GHLRVCWVFSASLLTPFRSATLI

SEQ ID NO: 491 - protein, 25 aa, Artificial
  Peptide with targeting and/or antimicrobial activity
ELKITNYNVNTVLYRYYKWGNDLCE

SEQ ID NO: 492 - protein, 20 aa, Artificial
  Peptide with targeting and/or antimicrobial activity
ESVDKITEALEEDGFPAKVQ

SEQ ID NO: 493 - protein, 13 aa, Artificial
  Peptide with targeting and/or antimicrobial activity
DWEFTHKTIPQKK

SEQ ID NO: 494 - protein, 21 aa, Artificial
  Peptide with targeting and/or antimicrobial activity
SETPEKPVGTFFYSIYYKIIL

SEQ ID NO: 495 - protein, 23 aa, Artificial
  Peptide with targeting and/or antimicrobial activity
FLALAVIAGLFKVILIYAAPYLK

SEQ ID NO: 496 - protein, 9 aa, Artificial
  Peptide with targeting and/or antimicrobial activity
VFDNIDINF

SEQ ID NO: 497 - protein, 6 aa, Artificial
  Peptide with targeting and/or antimicrobial activity
HIKETR

SEQ ID NO: 498 - protein, 16 aa, Artificial
  Peptide with targeting and/or antimicrobial activity
VKFCIECQTKLERKRR

SEQ ID NO: 499 - protein, 13 aa, Artificial
  Peptide with targeting and/or antimicrobial activity
DYFYITLSQKNTF

SEQ ID NO: 500 - protein, 16 aa, Artificial
  Peptide with targeting and/or antimicrobial activity
MNCASPEFKKLMELYK

SEQ ID NO: 501 - protein, 38 aa, Artificial
  Peptide with targeting and/or antimicrobial activity
LMFFSENMDKRDTLSGKFRYFAGSKVIKLMNWLSENGK

SEQ ID NO: 502 - protein, 11 aa, Artificial
  Peptide with targeting and/or antimicrobial activity
NQLGSQAFAQL

SEQ ID NO: 503 - protein, 32 aa, Artificial
  Peptide with targeting and/or antimicrobial activity
DPILIQIGFTRFALRKAEAEKIEIQVEEGVPA

SEQ ID NO: 504 - protein, 17 aa, Artificial
  Peptide with targeting and/or antimicrobial activity
EDKPTNTIQEIKPVKWQ

SEQ ID NO: 505 - protein, 38 aa, Artificial
  Peptide with targeting and/or antimicrobial activity
AVRDFKKSVREEDEAASLNSPRTIDAQVKTSESTSVKS

SEQ ID NO: 506 - protein, 18 aa, Artificial
  Peptide with targeting and/or antimicrobial activity
FDQLYALEREGKLDELLA

SEQ ID NO: 507 - protein, 27 aa, Artificial
  Peptide with targeting and/or antimicrobial activity
DANAMARTTIAIVYILALIALTISYSL

SEQ ID NO: 508 - protein, 8 aa, Artificial
  Peptide with targeting and/or antimicrobial activity
RTPYILRS

SEQ ID NO: 509 - protein, 32 aa, Artificial
  Peptide with targeting and/or antimicrobial activity
GIPFSKPHKRQVNYMKSDVLAYIEQNKMAHTA

SEQ ID NO: 510 - protein, 28 aa, Artificial
  Peptide with targeting and/or antimicrobial activity
KEIRTATVAELNAKRRLTSAEQALAEVS

SEQ ID NO: 511 - protein, 10 aa, Artificial
  Peptide with targeting and/or antimicrobial activity
YVKPKVGVHE

SEQ ID NO: 512 - protein, 40 aa, Artificial
  Peptide with targeting and/or antimicrobial activity
RNAVVVTEATFPKYEEEITNYLNRRFGEDWSLKLEKCSVA

SEQ ID NO: 513 - protein, 17 aa, Artificial
  Peptide with targeting and/or antimicrobial activity
PKHNVVTGVSVDLDYKP

SEQ ID NO: 514 - protein, 13 aa, Artificial
  Peptide with targeting and/or antimicrobial activity
RITEVPPDEHSDR

SEQ ID NO: 515 - protein, 33 aa, Artificial
  Peptide with targeting and/or antimicrobial activity
KLFEDPLIKSKAVENFQTTWHEQCLAKELAKNM

SEQ ID NO: 516 - protein, 27 aa, Artificial
  Peptide with targeting and/or antimicrobial activity
HMRTISYLLAFAKFSLFIPPKQSLKRL

SEQ ID NO: 517 - protein, 41 aa, Artificial
  Peptide with targeting and/or antimicrobial activity
MNDVKPVVQPKQTLKAFLVQLLSVRAGVYIKQNNQLPKTKG

SEQ ID NO: 518 - protein, 32 aa, Artificial
  Peptide with targeting and/or antimicrobial activity
QPDEKAEFFDPSLDKVYRHPTFYHIPDGIEHM

SEQ ID NO: 519 - protein, 8 aa, Artificial
  Peptide with targeting and/or antimicrobial activity
ETAASETH

SEQ ID NO: 520 - protein, 30 aa, Artificial
  Peptide with targeting and/or antimicrobial activity
ILSKLWFWMINSLGVVLLVSYWLLAKWGVA

SEQ ID NO: 521 - protein, 9 aa, Artificial
  Peptide with targeting and/or antimicrobial activity
INSRYKISF

SEQ ID NO: 522 - protein, 40 aa, Artificial
  Peptide with targeting and/or antimicrobial activity
MKKLVAALAVIVILTGCVYDPVNYDKIHDQEFQDHLRQNG

SEQ ID NO: 523 - protein, 6 aa, Artificial
  Peptide with targeting and/or antimicrobial activity
VRDDDS

SEQ ID NO: 524 - protein, 37 aa, Artificial
  Peptide with targeting and/or antimicrobial activity
FIYGVGFVPHFWLWKWLFSPWIAWPLMLLGYYIWFLT

SEQ ID NO: 525 - protein, 24 aa, Artificial
  Peptide with targeting and/or antimicrobial activity
DHKINESQHNPFRSDSNKQNVDFF

SEQ ID NO: 526 - protein, 39 aa, Artificial
  Peptide with targeting and/or antimicrobial activity
EYFKQVYVKNEKIYSFWICKDLSPKEAAKRAEDILVKLK

SEQ ID NO: 527 - protein, 38 aa, Artificial
  Peptide with targeting and/or antimicrobial activity
VWENRKKYLENEIERHNVFLKLGQEVIKGLNALASRGR

SEQ ID NO: 528 - protein, 35 aa, Artificial
  Peptide with targeting and/or antimicrobial activity
LPFSKIGRRVSYKKKDVLKYEQSKTVLNTAQLATV

SEQ ID NO: 529 - protein, 36 aa, Artificial
  Peptide with targeting and/or antimicrobial activity
DPHSEIDVTRYCQLHHFTCQTMQISEREFHYLIETQ

SEQ ID NO: 530 - protein, 7 aa, Artificial
  Peptide with targeting and/or antimicrobial activity
NLKKCPC

SEQ ID NO: 531 - protein, 41 aa, Artificial
  Peptide with targeting and/or antimicrobial activity
MKTLFFPLFLIIFVLIIQALDQSYQKKIGISKPQKHPEFMQ

SEQ ID NO: 532 - protein, 14 aa, Artificial
  Peptide with targeting and/or antimicrobial activity
DQEKKNKTEESTEQ

SEQ ID NO: 533 - protein, 7 aa, Artificial
  Peptide with targeting and/or antimicrobial activity
SDDKRTD

SEQ ID NO: 534 - protein, 15 aa, Artificial
  Peptide with targeting and/or antimicrobial activity
EVLLSDLRPDIFSET

SEQ ID NO: 535 - protein, 42 aa, Artificial
  Peptide with targeting and/or antimicrobial activity
MYLTPYAWIAVGSIFAFSVTTIKIGDQNDEKQKSHKNDVHKR

SEQ ID NO: 536 - protein, 9 aa, Artificial
  Peptide with targeting and/or antimicrobial activity
AAQPQTTSP

SEQ ID NO: 537 - protein, 23 aa, Artificial
  Peptide with targeting and/or antimicrobial activity
LVGALLIFVALIYMVLKGNADKN

SEQ ID NO: 538 - protein, 41 aa, Artificial
  Peptide with targeting and/or antimicrobial activity
LVSGVANTVKNTAHTVGNTAKHAGHVAADTTVKATKKQQVK

SEQ ID NO: 539 - protein, 17 aa, Artificial
  Peptide with targeting and/or antimicrobial activity
LDLALSTNSLNLEGFSF

SEQ ID NO: 540 - protein, 24 aa, Artificial
  Peptide with targeting and/or antimicrobial activity
LSLATFAKIFMTRSNWSLKRFNRL

SEQ ID NO: 541 - protein, 31 aa, Artificial
  Peptide with targeting and/or antimicrobial activity
SHIGFISISACLAVLLGIARLFVWTWVKFFA

SEQ ID NO: 542 - protein, 19 aa, Artificial
  Peptide with targeting and/or antimicrobial activity
SYNTYYNKLIHGQRTPDGM

SEQ ID NO: 543 - protein, 18 aa, Artificial
  Peptide with targeting and/or antimicrobial activity
QNNDTSAWCGSAHKNGNS

SEQ ID NO: 544 - protein, 30 aa, Artificial
  Peptide with targeting and/or antimicrobial activity
MIRIRSPTKKKLNRNSISDWKSNTSGRFFY

SEQ ID NO: 545 - protein, 21 aa, Artificial
  Peptide with targeting and/or antimicrobial activity
MRYITYSLIPRLLSKKVIHQQ

SEQ ID NO: 546 - protein, 14 aa, Artificial
  Peptide with targeting and/or antimicrobial activity
VPAKLLRVIDEIPE

SEQ ID NO: 547 - protein, 13 aa, Artificial
  Peptide with targeting and/or antimicrobial activity
IYQLLNIEYSEDD

SEQ ID NO: 548 - protein, 30 aa, Artificial
  Peptide with targeting and/or antimicrobial activity
MGRHLWNPSYFVATVSENTEEQIRKYRKNK

SEQ ID NO: 549 - protein, 10 aa, Artificial
  Peptide with targeting and/or antimicrobial activity
DVDGAIESEL

SEQ ID NO: 550 - protein, 19 aa, Artificial
  Peptide with targeting and/or antimicrobial activity
SFVSTTVRLIFEESKRYKF

SEQ ID NO: 551 - protein, 21 aa, Artificial
  Peptide with targeting and/or antimicrobial activity
DFLVNFLWFKGELNWGKKRYK

SEQ ID NO: 552 - protein, 32 aa, Artificial
  Peptide with targeting and/or antimicrobial activity
NIQVYESECGNYIFKKSDESFLIDIFDKNGTH

SEQ ID NO: 553 - protein, 28 aa, Artificial
  Peptide with targeting and/or antimicrobial activity
ISKGIDDIVYVINKILSIGNIFKIIKRK

SEQ ID NO: 554 - protein, 14 aa, Artificial
  Peptide with targeting and/or antimicrobial activity
LATKLKYEKEHKKM

SEQ ID NO: 555 - protein, 15 aa, Artificial
  Peptide with targeting and/or antimicrobial activity
VKDVLLELFNKIIGA

SEQ ID NO: 556 - protein, 18 aa, Artificial
  Peptide with targeting and/or antimicrobial activity
GIVLIGLKLIPLLANVLN

SEQ ID NO: 557 - protein, 33 aa, Artificial
  Peptide with targeting and/or antimicrobial activity
LVKDTSDIKNDLNNIEIVTSKNSNDIAKLKSVK

SEQ ID NO: 558 - protein, 36 aa, Artificial
  Peptide with targeting and/or antimicrobial activity
MREWICPSCNETHDRDINASINILKEGLRLITIQNK

SEQ ID NO: 559 - protein, 28 aa, Artificial
  Peptide with targeting and/or antimicrobial activity
GCILPHKKDNYNYIMSKFQDLVKITSKK

SEQ ID NO: 560 - protein, 37 aa, Artificial
  Peptide with targeting and/or antimicrobial activity
MKRRRCNWCGKLFYLEEKSKEAYCCKECRKKAKKVKK

SEQ ID NO: 561 - protein, 9 aa, Artificial
  Peptide with targeting and/or antimicrobial activity
QQYLILDRM

SEQ ID NO: 562 - protein, 22 aa, Artificial
  Peptide with targeting and/or antimicrobial activity
GIPGMTAAPAEENEQEENADEE

SEQ ID NO: 563 - protein, 26 aa, Artificial
  Peptide with targeting and/or antimicrobial activity
IDAVTKKKTTCMIRAPTKIPIAHTDN

SEQ ID NO: 564 - protein, 32 aa, Artificial
  Peptide with targeting and/or antimicrobial activity
YITSHKNARAIIKKFERDEILEEVITHYLNRK

SEQ ID NO: 565 - protein, 37 aa, Artificial
  Peptide with targeting and/or antimicrobial activity
ECLKKAIKSKALNKAFKIDVPDEVYDNLLMELEEYEK

SEQ ID NO: 566 - protein, 7 aa, Artificial
  Peptide with targeting and/or antimicrobial activity
LILVSDI

SEQ ID NO: 567 - protein, 41 aa, Artificial
  Peptide with targeting and/or antimicrobial activity
SIGSMIGMYSFRHKTKHIKFTFGIPFILFLQFLLVYFYILK

SEQ ID NO: 568 - protein, 40 aa, Artificial
  Peptide with targeting and/or antimicrobial activity
DSGYYALLENKEERVVWDGEVVANNIFNNLWIVVNKVKTG

SEQ ID NO: 569 - protein, 28 aa, Artificial
  Peptide with targeting and/or antimicrobial activity
ARESIEKSHVPVDATIVGVVDSFEVFDE

SEQ ID NO: 570 - protein, 5 aa, Artificial
  Peptide with targeting and/or antimicrobial activity
HFSLL

SEQ ID NO: 571 - protein, 11 aa, Artificial
  Peptide with targeting and/or antimicrobial activity
LTIDEKLRNHR

SEQ ID NO: 572 - protein, 38 aa, Artificial
  Peptide with targeting and/or antimicrobial activity
VIVGNLGAQKEKRNDTPISAKKDIMGDKTVRVRADLHH

SEQ ID NO: 573 - protein, 15 aa, Artificial
  Peptide with targeting and/or antimicrobial activity
NGNEKAFSEVENLVK

SEQ ID NO: 574 - protein, 12 aa, Artificial
  Peptide with targeting and/or antimicrobial activity
IGILFDKSVRKY

SEQ ID NO: 575 - protein, 20 aa, Artificial
  Peptide with targeting and/or antimicrobial activity
YMTKKLVEMAEQQMAGKSNR

SEQ ID NO: 576 - protein, 9 aa, Artificial
  Peptide with targeting and/or antimicrobial activity
QQYLILDRM

SEQ ID NO: 577 - protein, 23 aa, Artificial
  Peptide with targeting and/or antimicrobial activity
MLTSRKKRLKKIVEEQNKKDESI

SEQ ID NO: 578 - protein, 17 aa, Artificial
  Peptide with targeting and/or antimicrobial activity
YMTKKLVEMAERQMAGK

SEQ ID NO: 579 - protein, 17 aa, Artificial
  Peptide with targeting and/or antimicrobial activity
KGTSCPDQLSKAIRQSI

SEQ ID NO: 580 - protein, 15 aa, Artificial
  Peptide with targeting and/or antimicrobial activity
VKDVLLELFNKIIGA

SEQ ID NO: 581 - protein, 22 aa, Artificial
  Peptide with targeting and/or antimicrobial activity
DERLPEAKAIRNFNGSVMVLGR

SEQ ID NO: 582 - protein, 15 aa, Artificial
  Peptide with targeting and/or antimicrobial activity
GIFTGVTVVVSLKHC

SEQ ID NO: 583 - protein, 22 aa, Artificial
  Peptide with targeting and/or antimicrobial activity
ESASAAEWYNPNMNVKKAICMG

SEQ ID NO: 584 - protein, 30 aa, Artificial
  Peptide with targeting and/or antimicrobial activity
MPKSCHVPVLCDFFFLVIIKFLALFKTIQS

SEQ ID NO: 585 - protein, 10 aa, Artificial
  Peptide with targeting and/or antimicrobial activity
LAVILRAIVY

SEQ ID NO: 586 - protein, 21 aa, Artificial
  Peptide with targeting and/or antimicrobial activity
YLFFKGKKVAEEEATKDEVKR

SEQ ID NO: 587 - protein, 6 aa, Artificial
  Peptide with targeting and/or antimicrobial activity
RVKKIG

SEQ ID NO: 588 - protein, 20 aa, Artificial
  Peptide with targeting and/or antimicrobial activity
EKTNFKGVKRNFYKKASFFV

SEQ ID NO: 589 - protein, 19 aa, Artificial
  Peptide with targeting and/or antimicrobial activity
FTFSKCRASNGRGFGTLWL

SEQ ID NO: 590 - protein, 15 aa, Artificial
  Peptide with targeting and/or antimicrobial activity
WIAIGLLLYFSLKNQ

SEQ ID NO: 591 - protein, 21 aa, Artificial
  Peptide with targeting and/or antimicrobial activity
VSIKIGAIVIGMIGLMELLTE

SEQ ID NO: 592 - protein, 30 aa, Artificial
  Peptide with targeting and/or antimicrobial activity
MLTIIIGFIFWTMTLMLGYLIGEREGRKHE

SEQ ID NO: 593 - protein, 13 aa, Artificial
  Peptide with targeting and/or antimicrobial activity
RNTAHNIKWRSKN

SEQ ID NO: 594 - protein, 30 aa, Artificial
  Peptide with targeting and/or antimicrobial activity
MTVMEDPGSEQRNKIQSPMKGEDFSALFGR

SEQ ID NO: 595 - protein, 30 aa, Artificial
  Peptide with targeting and/or antimicrobial activity
MEQKVKVIFVPRSKPDNQLKTFVSAVLFKA

SEQ ID NO: 596 - protein, 12 aa, Artificial
  Peptide with targeting and/or antimicrobial activity
NQVTEGIRLLVE

SEQ ID NO: 597 - protein, 17 aa, Artificial
  Peptide with targeting and/or antimicrobial activity
NIERILKEKVWMIRCVE

SEQ ID NO: 598 - protein, 25 aa, Artificial
  Peptide with targeting and/or antimicrobial activity
SMLSVTVMCLMHASVAANQAMEKKV

SEQ ID NO: 599 - protein, 7 aa, Artificial
  Peptide with targeting and/or antimicrobial activity
LVNGIKI

SEQ ID NO: 600 - protein, 20 aa, Artificial
  Peptide with targeting and/or antimicrobial activity
LYKQKIQLEEELEKLKDDRQ

SEQ ID NO: 601 - protein, 19 aa, Artificial
  Peptide with targeting and/or antimicrobial activity
ALCSVIKAIELGIINVHLQ

SEQ ID NO: 602 - protein, 20 aa, Artificial
  Peptide with targeting and/or antimicrobial activity
TKTPGTFTPGTGIQKTAVPL

SEQ ID NO: 603 - protein, 6 aa, Artificial
  Peptide with targeting and/or antimicrobial activity
MLKQTA

SEQ ID NO: 604 - protein, 30 aa, Artificial
  Peptide with targeting and/or antimicrobial activity
MSEAVNLLRGARYSQRYAKNQVPYEVIIEK

SEQ ID NO: 605 - protein, 16 aa, Artificial
  Peptide with targeting and/or antimicrobial activity
VIFLHKESGNLKEIFY

SEQ ID NO: 606 - protein, 7 aa, Artificial
  Peptide with targeting and/or antimicrobial activity
TFIYNEF

SEQ ID NO: 607 - protein, 18 aa, Artificial
  Peptide with targeting and/or antimicrobial activity
KKQDKRIEDKYKRMKKGD

SEQ ID NO: 608 - protein, 8 aa, Artificial
  Peptide with targeting and/or antimicrobial activity
HFYLLFER

SEQ ID NO: 609 - protein, 20 aa, Artificial
  Peptide with targeting and/or antimicrobial activity
HLFFVKGMFILCQKNQINDE

SEQ ID NO: 610 - protein, 30 aa, Artificial
  Peptide with targeting and/or antimicrobial activity
MDSAKAQTMRTDWLAVSCLVASAYLRSMLA

SEQ ID NO: 611 - protein, 27 aa, Artificial
  Peptide with targeting and/or antimicrobial activity
MTVFEALMLAIAFATLIVKISNKNDKK

SEQ ID NO: 612 - protein, 21 aa, Artificial
  Peptide with targeting and/or antimicrobial activity
ESAKSNLNFLMQEEWALFLLL

SEQ ID NO: 613 - protein, 23 aa, Artificial
  Peptide with targeting and/or antimicrobial activity
VFVVLFIIYLASKLLTKLFPIKK

SEQ ID NO: 614 - protein, 16 aa, Artificial
  Peptide with targeting and/or antimicrobial activity
KKIIPLITLFVVTLVG

SEQ ID NO: 615 - protein, 24 aa, Artificial
  Peptide with targeting and/or antimicrobial activity
QGANPCQQVGFTVNDPDCRLAKTV

SEQ ID NO: 616 - protein, 21 aa, Artificial
  Peptide with targeting and/or antimicrobial activity
KYKCSWCKRVYTLRKDHKTAR

SEQ ID NO: 617 - protein, 12 aa, Artificial
  Peptide with targeting and/or antimicrobial activity
WSEIEINTKQSN

SEQ ID NO: 618 - protein, 10 aa, Artificial
  Peptide with targeting and/or antimicrobial activity
HISKERFEAY

SEQ ID NO: 619 - protein, 25 aa, Artificial
  Peptide with targeting and/or antimicrobial activity
MIKKSILKIKYYVPVLISLTLILSA

SEQ ID NO: 620 - protein, 20 aa, Artificial
  Peptide with targeting and/or antimicrobial activity
FTLTLITTIVAILNYKDKKK

SEQ ID NO: 621 - protein, 29 aa, Artificial
  Peptide with targeting and/or antimicrobial activity
GAVGIAFFAGNMKQDKRIADRQNKKSEKK

SEQ ID NO: 622 - protein, 18 aa, Artificial
  Peptide with targeting and/or antimicrobial activity
ITPLLDEIGKVCIDKISK

SEQ ID NO: 623 - protein, 36 aa, Artificial
  Peptide with targeting and/or antimicrobial activity
GLQFKEIAEEFHITTTALQQWHKDNGYPIYNKNNRK

SEQ ID NO: 624 - protein, 14 aa, Artificial
  Peptide with targeting and/or antimicrobial activity
VVAYVITQVGAIRF

SEQ ID NO: 625 - protein, 14 aa, Artificial
  Peptide with targeting and/or antimicrobial activity
DPAGCNDIVRKYCK

SEQ ID NO: 626 - protein, 14 aa, Artificial
  Peptide with targeting and/or antimicrobial activity
DLVQSILSEFKKSG

SEQ ID NO: 627 - protein, 10 aa, Artificial
  Peptide with targeting and/or antimicrobial activity
VLKEECYQKN

SEQ ID NO: 628 - protein, 16 aa, Artificial
  Peptide with targeting and/or antimicrobial activity
YCVPLGNMGNMNNKIW

SEQ ID NO: 629 - protein, 28 aa, Artificial
  Peptide with targeting and/or antimicrobial activity
LIYTILASLGVLTVLQAILGREPKAVKA

SEQ ID NO: 630 - protein, 10 aa, Artificial
  Peptide with targeting and/or antimicrobial activity
VEDLMEDLNA

SEQ ID NO: 631 - protein, 25 aa, Artificial
  Peptide with targeting and/or antimicrobial activity
ILVVLAGILLVVLSYVGISKFKMNC

SEQ ID NO: 632 - protein, 25 aa, Artificial
  Peptide with targeting and/or antimicrobial activity
FPIISALLGAIICIAIYSFIVNRKA

SEQ ID NO: 633 - protein, 15 aa, Artificial
  Peptide with targeting and/or antimicrobial activity
VIAWKFRNKFENSGV

SEQ ID NO: 634 - protein, 25 aa, Artificial
  Peptide with targeting and/or antimicrobial activity
YWLSRVTTGHSFAFEKPVPLSLTIK

SEQ ID NO: 635 - protein, 14 aa, Artificial
  Peptide with targeting and/or antimicrobial activity
FIDVLKSKINEFLN

SEQ ID NO: 636 - protein, 25 aa, Artificial
  Peptide with targeting and/or antimicrobial activity
LLSTEQLLKYYDGETFDGFQLPSNE

SEQ ID NO: 637 - protein, 9 aa, Artificial
  Peptide with targeting and/or antimicrobial activity
VLYFQATVV

SEQ ID NO: 638 - protein, 18 aa, Artificial
  Peptide with targeting and/or antimicrobial activity
LVRIEVDDLEEWYERNFI

SEQ ID NO: 639 - protein, 27 aa, Artificial
  Peptide with targeting and/or antimicrobial activity
YLEMNADYLSNMDIFDELWEKYLENNK

SEQ ID NO: 640 - protein, 20 aa, Artificial
  Peptide with targeting and/or antimicrobial activity
KPKNKKEKTVISYEKLLSMY

SEQ ID NO: 641 - protein, 16 aa, Artificial
  Peptide with targeting and/or antimicrobial activity
YCVPLGNMGNMNNKIW

SEQ ID NO: 642 - protein, 14 aa, Artificial
  Peptide with targeting and/or antimicrobial activity
DLVQSILSEFKKSG

SEQ ID NO: 643 - protein, 18 aa, Artificial
  Peptide with targeting and/or antimicrobial activity
FALELIALCRNLFIVYFP

SEQ ID NO: 644 - protein, 17 aa, Artificial
  Peptide with targeting and/or antimicrobial activity
WVAVAILLNIALQTQLT

SEQ ID NO: 645 - protein, 10 aa, Artificial
  Peptide with targeting and/or antimicrobial activity
TSGWLGQLEQ

SEQ ID NO: 646 - protein, 22 aa, Artificial
  Peptide with targeting and/or antimicrobial activity
TFAGSIKIGVPDLVHVTFNCKR

SEQ ID NO: 647 - protein, 7 aa, Artificial
  Peptide with targeting and/or antimicrobial activity
LLNKKLE

SEQ ID NO: 648 - protein, 16 aa, Artificial
  Peptide with targeting and/or antimicrobial activity
SKAGLYGKIERSDKRE

SEQ ID NO: 649 - protein, 6 aa, Artificial
  Peptide with targeting and/or antimicrobial activity
DSYFRS

SEQ ID NO: 650 - protein, 22 aa, Artificial
  Peptide with targeting and/or antimicrobial activity
FFLVHFYIRKRKGKVSIFLNYF

SEQ ID NO: 651 - protein, 13 aa, Artificial
  Peptide with targeting and/or antimicrobial activity
KHCFEITDKTDVV

SEQ ID NO: 652 - protein, 30 aa, Artificial
  Peptide with targeting and/or antimicrobial activity
MSRKKYENDEKSQKKLKIGRKSDVFYGIID

SEQ ID NO: 653 - protein, 21 aa, Artificial
  Peptide with targeting and/or antimicrobial activity
AGKKERLLSFREQFLNKNKKK

SEQ ID NO: 654 - protein, 17 aa, Artificial
  Peptide with targeting and/or antimicrobial activity
IAAFVTSRAFSDTVSPI

SEQ ID NO: 655 - protein, 30 aa, Artificial
  Peptide with targeting and/or antimicrobial activity
MMELVLKTIIGPIVVGVVLRIVDKWLNKDK

SEQ ID NO: 656 - protein, 30 aa, Artificial
  Peptide with targeting and/or antimicrobial activity
MLQKYTQMISVTKCIITKNKKTQENVDAYN

SEQ ID NO: 657 - protein, 20 aa, Artificial
  Peptide with targeting and/or antimicrobial activity
YVLEYHGLRATQDVDAFMAL

SEQ ID NO: 658 - protein, 7 aa, Artificial
  Peptide with targeting and/or antimicrobial activity
ENEESIF

SEQ ID NO: 659 - protein, 15 aa, Artificial
  Peptide with targeting and/or antimicrobial activity
AATLICVGSGIMSSL

SEQ ID NO: 660 - protein, 13 aa, Artificial
  Peptide with targeting and/or antimicrobial activity
AVVCGYLAYTATS

SEQ ID NO: 661 - protein, 9 aa, Artificial
  Peptide with targeting and/or antimicrobial activity
VAYAAICWW

SEQ ID NO: 662 - protein, 13 aa, Artificial
  Peptide with targeting and/or antimicrobial activity
FNGDSEFFLCIAF

SEQ ID NO: 663 - protein, 27 aa, Artificial
  Peptide with targeting and/or antimicrobial activity
MRKEFHNVLSSGQLLADKRPARDYNRK

SEQ ID NO: 664 - protein, 16 aa, Artificial
  Peptide with targeting and/or antimicrobial activity
GQLLADKRPARDYNRK

SEQ ID NO: 665 - protein, 30 aa, Artificial
  Peptide with targeting and/or antimicrobial activity
MSRWDGHSDKGEAPAGKPPMHGFGLNGENK

SEQ ID NO: 666 - protein, 13 aa, Artificial
  Peptide with targeting and/or antimicrobial activity
KKHVLVGKQEKNG

SEQ ID NO: 667 - protein, 24 aa, Artificial
  Peptide with targeting and/or antimicrobial activity
QPYFQNQFKKITGYTPLQYRKEKR

SEQ ID NO: 668 - protein, 25 aa, Artificial
  Peptide with targeting and/or antimicrobial activity
RVLVLKKFHGIMDGNRNVAVFFVGQ

SEQ ID NO: 669 - protein, 30 aa, Artificial
  Peptide with targeting and/or antimicrobial activity
MFIISPDLFNIAVILYILFFIHDILLLILS

SEQ ID NO: 670 - protein, 20 aa, Artificial
  Peptide with targeting and/or antimicrobial activity
TQVHKMARGIDPGPANGIYR

SEQ ID NO: 671 - protein, 30 aa, Artificial
  Peptide with targeting and/or antimicrobial activity
MQIFYIKTKIFLSFFLFLLIFSQCFYKIEE

SEQ ID NO: 672 - protein, 21 aa, Artificial
  Peptide with targeting and/or antimicrobial activity
KLLYFFNYFENLQQVHLLVQL

SEQ ID NO: 673 - protein, 30 aa, Artificial
  Peptide with targeting and/or antimicrobial activity
MAAKLWEEGKMVYASSASMTKRLKLAMSKV

SEQ ID NO: 674 - protein, 14 aa, Artificial
  Peptide with targeting and/or antimicrobial activity
ASMTKRLKLAMSKV

SEQ ID NO: 675 - protein, 6 aa, Artificial
  Peptide with targeting and/or antimicrobial activity
SGNEKV

SEQ ID NO: 676 - protein, 22 aa, Artificial
  Peptide with targeting and/or antimicrobial activity
IDKSRNKDQFSHIFGLYNICSG

SEQ ID NO: 677 - protein, 15 aa, Artificial
  Peptide with targeting and/or antimicrobial activity
SLQSQLGPCLHDQRH

SEQ ID NO: 678 - protein, 13 aa, Artificial
  Peptide with targeting and/or antimicrobial activity
HRNLIILQRTIFI

SEQ ID NO: 679 - protein, 30 aa, Artificial
  Peptide with targeting and/or antimicrobial activity
MVNYIIGSYMLYREQNNNEALRKFDITLAM

SEQ ID NO: 680 - protein, 30 aa, Artificial; identical to SEQ ID NO: 328
  Peptide with targeting and/or antimicrobial activity

SEQ ID NO: 681 - protein, 11 aa, Artificial
  Peptide with targeting and/or antimicrobial activity
IIQDIAHAFGY

SEQ ID NO: 682 - protein, 30 aa, Artificial
  Peptide with targeting and/or antimicrobial activity
MSVFVPVTNIFMFIMSPIFNVNLLHFKVYI

SEQ ID NO: 683 - protein, 9 aa, Artificial
  Peptide with targeting and/or antimicrobial activity
TCVKPRTIN

SEQ ID NO: 684 - protein, 8 aa, Artificial
  Peptide with targeting and/or antimicrobial activity
INKYHHIA

SEQ ID NO: 685 - protein, 25 aa, Artificial
  Peptide with targeting and/or antimicrobial activity
ISLIIFIMLFVVALFKCITNYKHQS

SEQ ID NO: 686 - protein, 16 aa, Artificial
  Peptide with targeting and/or antimicrobial activity
EKRMSFNENQSHRPLL

SEQ ID NO: 687 - protein, 30 aa, Artificial
  Peptide with targeting and/or antimicrobial activity
MEHVLPFQNTPPNIVIIYKDFTHLKSITFS

SEQ ID NO: 688 - protein, 30 aa, Artificial
  Peptide with targeting and/or antimicrobial activity
MTLAIKNCSVTKCLGFGDFVNDDSDSYFDA

SEQ ID NO: 689 - protein, 7 aa, Artificial
  Peptide with targeting and/or antimicrobial activity
KNKTDTL

SEQ ID NO: 690 - protein, 30 aa, Artificial
  Peptide with targeting and/or antimicrobial activity
MVILVFSLIFIFTDNYLVYQSKSIKEDVMI

SEQ ID NO: 691 - protein, 10 aa, Artificial
  Peptide with targeting and/or antimicrobial activity
VDMVNRFLGN

SEQ ID NO: 692 - protein, 25 aa, Artificial
  Peptide with targeting and/or antimicrobial activity
KPVGKALEEIADGKIEPVVPKEYLG

SEQ ID NO: 693 - protein, 6 aa, Artificial
  Peptide with targeting and/or antimicrobial activity
VRKSDQ

SEQ ID NO: 694 - protein, 9 aa, Artificial
  Peptide with targeting and/or antimicrobial activity
YYKDYFKEI

SEQ ID NO: 695 - protein, 17 aa, Artificial
  Peptide with targeting and/or antimicrobial activity
YKVNYNNIDNHFNTLRH

SEQ ID NO: 696 - protein, 18 aa, Artificial
  Peptide with targeting and/or antimicrobial activity
PYSDSYATRPHWEQHRAR

SEQ ID NO: 697 - protein, 30 aa, Artificial
  Peptide with targeting and/or antimicrobial activity
MVGKIRGVTPRNDLLNANITGQLNLNYRLI

SEQ ID NO: 698 - protein, 30 aa, Artificial
  Peptide with targeting and/or antimicrobial activity
MHISHLLDEVEQTEREKAVNVLENMNGNVI

SEQ ID NO: 699 - protein, 25 aa, Artificial
  Peptide with targeting and/or antimicrobial activity
MAADIISTIGDLVKWIIDTVNKFKK

SEQ ID NO: 700 - protein, 30 aa, Artificial
  Peptide with targeting and/or antimicrobial activity
MHRNLVLVKMEPIPHIMIIANQIGIIIEKA

SEQ ID NO: 701 - protein, 30 aa, Artificial
  Peptide with targeting and/or antimicrobial activity
MREKVRFTQAFKLFWTNYFNFKGRSRRSEY

SEQ ID NO: 702 - protein, 14 aa, Artificial
  Peptide with targeting and/or antimicrobial activity
WADAQYKLCENCSE

SEQ ID NO: 703 - protein, 12 aa, Artificial
  Peptide with targeting and/or antimicrobial activity
HKNKLNIPHIKS

SEQ ID NO: 704 - protein, 20 aa, Artificial
  Peptide with targeting and/or antimicrobial activity
HLFILKSHLKPFPPFRYTYD

SEQ ID NO: 705 - protein, 12 aa, Artificial
  Peptide with targeting and/or antimicrobial activity
AYILKRREEKNK

SEQ ID NO: 706 - protein, 30 aa, Artificial
  Peptide with targeting and/or antimicrobial activity
MVEILVNTAISVYIVALYTQWLSTRDNLKA

SEQ ID NO: 707 - protein, 36 aa, Artificial
  Peptide with targeting and/or antimicrobial activity
DELYEIMDKVIEEFNKDIEQNNNNGNNEDLTENKIN

SEQ ID NO: 708 - protein, 17 aa, Artificial
  Peptide with targeting and/or antimicrobial activity
LVGYVRTSGTVRSYKIN

SEQ ID NO: 709 - protein, 12 aa, Artificial
  Peptide with targeting and/or antimicrobial activity
EDNKDKKDKKDK

SEQ ID NO: 710 - protein, 12 aa, Artificial
  Peptide with targeting and/or antimicrobial activity
HKKDIRKQVFKN

SEQ ID NO: 711 - protein, 9 aa, Artificial
  Peptide with targeting and/or antimicrobial activity
MQKEGEEDY

SEQ ID NO: 712 - protein, 30 aa, Artificial
  Peptide with targeting and/or antimicrobial activity
MYKAIAVLAMTIMAFFIFVYPFFIVGLILG

SEQ ID NO: 713 - protein, 18 aa, Artificial
  Peptide with targeting and/or antimicrobial activity
YPNEQGHHKNNLKNIIIE

SEQ ID NO: 714 - protein, 14 aa, Artificial
  Peptide with targeting and/or antimicrobial activity
KVDRVSTTITEKIK

SEQ ID NO: 715 - protein, 13 aa, Artificial
  Peptide with targeting and/or antimicrobial activity
RLILVSGNATVQK

SEQ ID NO: 716 - protein, 23 aa, Artificial
  Peptide with targeting and/or antimicrobial activity
IHQYSSKPDIVGQEAKTVQQINS

SEQ ID NO: 717 - protein, 17 aa, Artificial
  Peptide with targeting and/or antimicrobial activity
IQIDAASFYSISKSTIK

SEQ ID NO: 718 - protein, 18 aa, Artificial
  Peptide with targeting and/or antimicrobial activity
PGAFFFCRGRGCWCGIGW

SEQ ID NO: 719 - protein, 24 aa, Artificial
  Peptide with targeting and/or antimicrobial activity
FTEPLRPLQAKGQIISIKPSTSSS

SEQ ID NO: 720 - protein, 9 aa, Artificial
  Peptide with targeting and/or antimicrobial activity
KGIYKKRTY

SEQ ID NO: 721 - protein, 16 aa, Artificial
  Peptide with targeting and/or antimicrobial activity
EVTKRLVALAQQQLRG

SEQ ID NO: 722 - protein, 22 aa, Artificial
  Peptide with targeting and/or antimicrobial activity
LVLRICTDLFTFIKWTIKQRKS

SEQ ID NO: 723 - protein, 30 aa, Artificial
  Peptide with targeting and/or antimicrobial activity
MSEEEEVSEKVYNYLRRNEFFEVRKEEFSA

SEQ ID NO: 724 - protein, 24 aa, Artificial
  Peptide with targeting and/or antimicrobial activity
VYSFLYVLVIVRKLLSMKKRIERL

SEQ ID NO: 725 - protein, 30 aa, Artificial
  Peptide with targeting and/or antimicrobial activity
MGIFKEEKIKFIDCKGEEVILKIKIKDIKK

SEQ ID NO: 726 - protein, 24 aa, Artificial
  Peptide with targeting and/or antimicrobial activity
GSTAHKSPIGSTNNQWGMKKTPTD

SEQ ID NO: 727 - protein, 19 aa, Artificial
  Peptide with targeting and/or antimicrobial activity
NKGKQMQDQTGKQPIVDNG

SEQ ID NO: 728 - protein, 19 aa, Artificial
  Peptide with targeting and/or antimicrobial activity
VVTLKDIVAVIEDQGYDVQ

SEQ ID NO: 729 - protein, 15 aa, Artificial
  Peptide with targeting and/or antimicrobial activity
ILSVELSTKTSASGS

SEQ ID NO: 730 - protein, 10 aa, Artificial
  Peptide with targeting and/or antimicrobial activity
GYTKDPGTGI

SEQ ID NO: 731 - protein, 24 aa, Artificial
  Peptide with targeting and/or antimicrobial activity
SGRGFALIVVLFILLIIVGAACIR

SEQ ID NO: 732 - protein, 13 aa, Artificial
  Peptide with targeting and/or antimicrobial activity
LALSIANLFKKKA

SEQ ID NO: 733 - protein, 14 aa, Artificial
  Peptide with targeting and/or antimicrobial activity
VSTFGKVVKVVDEK

SEQ ID NO: 734 - protein, 16 aa, Artificial
  Peptide with targeting and/or antimicrobial activity
EAKVQAKGEQIACNNY

SEQ ID NO: 735 - protein, 17 aa, Artificial
  Peptide with targeting and/or antimicrobial activity
WYLYKKQSNQNDRGIPK

SEQ ID NO: 736 - protein, 21 aa, Artificial
  Peptide with targeting and/or antimicrobial activity
VMQSLYVKPPLILVTKLAQQN

SEQ ID NO: 737 - protein, 16 aa, Artificial
  Peptide with targeting and/or antimicrobial activity
SFMPEIQKNTIPTQMK

SEQ ID NO: 738 - protein, 16 aa, Artificial
  Peptide with targeting and/or antimicrobial activity
SNGVGLGVGIGSGIRF

SEQ ID NO: 739 - protein, 24 aa, Artificial
  Peptide with targeting and/or antimicrobial activity
QRFYKLFYHIDLTNEQALKLFQVK

SEQ ID NO: 740 - protein, 21 aa, Artificial
  Peptide with targeting and/or antimicrobial activity
DKSTQDKDIKQAKLLAQELGL

SEQ ID NO: 741 - protein, 14 aa, Artificial
  Peptide with targeting and/or antimicrobial activity
VKPTMTASLISTVC

SEQ ID NO: 742 - protein, 21 aa, Artificial
  Peptide with targeting and/or antimicrobial activity
SFYSKYSRYIDNLAGAIFLFF

SEQ ID NO: 743 - protein, 14 aa, Artificial
  Peptide with targeting and/or antimicrobial activity
YLVYSGVLATAAAF

SEQ ID NO: 744 - protein, 39 aa, Artificial
  Peptide with targeting and/or antimicrobial activity
LGLTAGVAYAAQPTNQPTNQPTNQPTNQPTNQPTNQPRW

SEQ ID NO: 745 - protein, 15 aa, Artificial
  Peptide with targeting and/or antimicrobial activity
CGKLLEQKNFFLKTR

SEQ ID NO: 746 - protein, 20 aa, Artificial
  Peptide with targeting and/or antimicrobial activity
FELVDWLETNLGKILKSKSA

SEQ ID NO: 747 - protein, 30 aa, Artificial
  Peptide with targeting and/or antimicrobial activity
ASKQASKQASKQASKQASKQASRSLKNHLL

SEQ ID NO: 748 - protein, 24 aa, Artificial
  Peptide with targeting and/or antimicrobial activity
PDAPRTCYHKPILAALSRIVVTDR

SEQ ID NO: 749 - protein, 15 aa, Artificial
  Peptide with targeting and/or antimicrobial activity
VLLLFIFQPFQKQLL

SEQ ID NO: 750 - protein, 32 aa, Artificial
  Peptide with targeting and/or antimicrobial activity
GSVIKKRRKRMAKKKHRKLLKKTRIQRRRAGK

SEQ ID NO: 751 - protein, 17 aa, Artificial
  Peptide with targeting and/or antimicrobial activity
LVDVVVLIRRHLPKSCS

SEQ ID NO: 752 - protein, 13 aa, Artificial
  Peptide with targeting and/or antimicrobial activity
LSEMERRRLRKRA

SEQ ID NO: 753 - protein, 13 aa, Artificial
  Peptide with targeting and/or antimicrobial activity
LANDYYKKTKKSW

SEQ ID NO: 754 - protein, 27 aa, Artificial
  Peptide with targeting and/or antimicrobial activity
SIILTKKKRRKIPLSIDSQIYKYTFKQ

SEQ ID NO: 755 - protein, 19 aa, Artificial
  Peptide with targeting and/or antimicrobial activity
KSILILIKVIFIGQTTIIL

SEQ ID NO: 756 - protein, 23 aa, Artificial
  Peptide with targeting and/or antimicrobial activity
KKDNPSLNDQDKNAVLNLLALAK

SEQ ID NO: 757 - protein, 26 aa, Artificial
  Peptide with targeting and/or antimicrobial activity
NILFGIIGFVVAMTAAVIVTAISIAK

SEQ ID NO: 758 - protein, 17 aa, Artificial
  Peptide with targeting and/or antimicrobial activity
FGEKQMRSWWKVHWFHP

SEQ ID NO: 759 - protein, 16 aa, Artificial
  Peptide with targeting and/or antimicrobial activity
RESKLIAMADMIRRRI

SEQ ID NO: 760 - protein, 12 aa, Artificial
  Peptide with targeting and/or antimicrobial activity
PIIAPTIKTQIQ

SEQ ID NO: 761 - protein, 18 aa, Artificial
  Peptide with targeting and/or antimicrobial activity
WSRVPGHSDTGWKVWHRW

SEQ ID NO: 762 - protein, 26 aa, Artificial
  Peptide with targeting and/or antimicrobial activity
ARPIADLIHFNSTTVTASGDVYYGPG

SEQ ID NO: 763 - protein, 16 aa, Artificial
  Peptide with targeting and/or antimicrobial activity
TGIGPIARPIEHGLDS

SEQ ID NO: 764 - protein, 25 aa, Artificial
  Peptide with targeting and/or antimicrobial activity
STENGWQEFESYADVGVDPRRYVPL

SEQ ID NO: 765 - protein, 27 aa, Artificial
  Peptide with targeting and/or antimicrobial activity
QVKEKRREIELQFRDAEKKLEASVQAE

SEQ ID NO: 766 - protein, 24 aa, Artificial
  Peptide with targeting and/or antimicrobial activity
ELDKADAALGPAKNLAPLDVINRS

SEQ ID NO: 767 - protein, 26 aa, Artificial
  Peptide with targeting and/or antimicrobial activity
LTIVGNALQQKNQKLLLNQKKITSLG

SEQ ID NO: 768 - protein, 25 aa, Artificial
  Peptide with targeting and/or antimicrobial activity
AKNFLTRTAEEIGEQAVREGNINGP

SEQ ID NO: 769 - protein, 28 aa, Artificial
  Peptide with targeting and/or antimicrobial activity
EAYMRFLDREMEGLTAAYNVKLFTEAIS

SEQ ID NO: 770 - protein, 19 aa, Artificial
  Peptide with targeting and/or antimicrobial activity
SLQIRMNTLTAAKASIEAA

SEQ ID NO: 771 - protein, 22 aa, Artificial
  Peptide with targeting and/or antimicrobial activity
AANKAREQAAAEAKRKAEEQAR

SEQ ID NO: 772 - protein, 12 aa, Artificial
  Peptide with targeting and/or antimicrobial activity
ADAPPPLIVRYS

SEQ ID NO: 773 - protein, 25 aa, Artificial
  Peptide with targeting and/or antimicrobial activity
SRPGKPGGVSIDVSRDRQDILSNYP

SEQ ID NO: 774 - protein, 20 aa, Artificial
  Peptide with targeting and/or antimicrobial activity
FGNPFRGFTLAMEADFKKRK

SEQ ID NO: 775 - protein, 20 aa, Artificial
  Peptide with targeting and/or antimicrobial activity
TPEQWLERSTVVVTGLLNRK

SEQ ID NO: 776 - protein, 25 aa, Artificial
  Peptide with targeting and/or antimicrobial activity
RPELDNELDVVQNSASLDKLQASYN

SEQ ID NO: 777 - protein, 25 aa, Artificial
  Peptide with targeting and/or antimicrobial activity
TIILNDQINSLQERLNKLNAETDRR

SEQ ID NO: 778 - protein, 24 aa, Artificial
  Peptide with targeting and/or antimicrobial activity
EAQQVTQQLGADFNAITTPTATKV

SEQ ID NO: 779 - protein, 25 aa, Artificial
  Peptide with targeting and/or antimicrobial activity
QQRVKAVDASLSQVSTQVSGAVASA

SEQ ID NO: 780 - protein, 14 aa, Artificial
  Peptide with targeting and/or antimicrobial activity
TQAVQVKTAQAQQQ

SEQ ID NO: 781 - protein, 24 aa, Artificial
  Peptide with targeting and/or antimicrobial activity
KSKISEYTEKEFLEFVEDIYTNNK

SEQ ID NO: 782 - protein, 25 aa, Artificial
  Peptide with targeting and/or antimicrobial activity
KKFPTEESHIQAVLEFKKLTEHPSG

SEQ ID NO: 783 - protein, 13 aa, Artificial
  Peptide with targeting and/or antimicrobial activity
WRASKGLPGFKAG

SEQ ID NO: 784 - protein, 23 aa, Artificial
  Peptide with targeting and/or antimicrobial activity
EKKLIVKLIDSIGKSHEEIVGAG

SEQ ID NO: 785 - protein, 25 aa, Artificial
  Peptide with targeting and/or antimicrobial activity
LNFRAENKILEKIHISLIDTVEGSA

SEQ ID NO: 786 - protein, 25 aa, Artificial
  Peptide with targeting and/or antimicrobial activity
AYSGELPEPLVRKMSKEQVRSVMGK

SEQ ID NO: 787 - protein, 25 aa, Artificial
  Peptide with targeting and/or antimicrobial activity
PFETRESFRVPVIGILGGWDYFMHP

SEQ ID NO: 788 - protein, 28 aa, Artificial
  Peptide with targeting and/or antimicrobial activity
QKANLRIGFTYTSDSNVCNLTFALLGSK

SEQ ID NO: 789 - protein, 30 aa, Artificial
  Peptide with targeting and/or antimicrobial activity
MILVCAAVIWGRVLFILKFPIYFSIRLAFL

SEQ ID NO: 790 - protein, 33 aa, Artificial
  Peptide with targeting and/or antimicrobial activity
EILNNNQVIKELTMKYKTQFESNLGGWTARARR

SEQ ID NO: 791 - protein, 7 aa, Artificial
  Peptide with targeting and/or antimicrobial activity
WTARARR

SEQ ID NO: 792 - protein, 28 aa, Artificial
  Peptide with targeting and/or antimicrobial activity
KFQGEFTNIGQSYIVSASHMSTSLNTGK

SEQ ID NO: 793 - protein, 15 aa, Artificial
  Peptide with targeting and/or antimicrobial activity
SYIKNLSNQKFLIAF

SEQ ID NO: 794 - protein, 16 aa, Artificial
  Peptide with targeting and/or antimicrobial activity
DYNHLLNVVQDWVNTN

SEQ ID NO: 795 - protein, 12 aa, Artificial
  Peptide with targeting and/or antimicrobial activity
FFNQANYFFKEF

SEQ ID NO: 796 - protein, 35 aa, Artificial
  Peptide with targeting and/or antimicrobial activity
ASGKYQSYLLNVYVDSKKDRLDIFDKLKAKAKFVL

SEQ ID NO: 797 - protein, 12 aa, Artificial
  Peptide with targeting and/or antimicrobial activity
ESVEAIKAKAIK

SEQ ID NO: 798 - protein, 36 aa, Artificial
  Peptide with targeting and/or antimicrobial activity
APLRIDEIRNSNVIDEVLDCAPKKQEHFFVVPKIIE

SEQ ID NO: 799 - protein, 10 aa, Artificial
  Peptide with targeting and/or antimicrobial activity
YYQAKLFPLL

SEQ ID NO: 800 - protein, 18 aa, Artificial
  Peptide with targeting and/or antimicrobial activity
IMKNYKYFKLFIVKYALF

SEQ ID NO: 801 - protein, 26 aa, Artificial
  Peptide with targeting and/or antimicrobial activity
MEISTLKKEKLHVKDELSQYLANYKK

SEQ ID NO: 802 - protein, 6 aa, Artificial
  Peptide with targeting and/or antimicrobial activity
IVSAIV

SEQ ID NO: 803 - protein, 19 aa, Artificial
  Peptide with targeting and/or antimicrobial activity
LQNKIYELLYIKERSKLCS

SEQ ID NO: 804 - protein, 24 aa, Artificial
  Peptide with targeting and/or antimicrobial activity
SKMWDKILTILILILELIRELIKL

SEQ ID NO: 805 - protein, 19 aa, Artificial
  Peptide with targeting and/or antimicrobial activity
DEIKVSDEEIEKFIKENNL

SEQ ID NO: 806 - protein, 23 aa, Artificial
  Peptide with targeting and/or antimicrobial activity
MKFMLEVRNKAISAYKEITRTQI

SEQ ID NO: 807 - protein, 9 aa, Artificial
  Peptide with targeting and/or antimicrobial activity
LFEIFKPKH

SEQ ID NO: 808 - protein, 41 aa, Artificial
  Peptide with targeting and/or antimicrobial activity
TKKIELKRFVDAFVKKSYENYILERELKKLIKAINEELPTK

SEQ ID NO: 809 - protein, 9 aa, Artificial
  Peptide with targeting and/or antimicrobial activity
YRVTVKALE

SEQ ID NO: 810 - protein, 16 aa, Artificial
  Peptide with targeting and/or antimicrobial activity
LEKEKKEYIEKLFKTK

SEQ ID NO: 811 - protein, 30 aa, Artificial
  Peptide with targeting and/or antimicrobial activity
IDKLKKMNLQKLSYEVRISQDGKSIYARIK

SEQ ID NO: 812 - protein, 7 aa, Artificial
  Peptide with targeting and/or antimicrobial activity
LMEQVEV

SEQ ID NO: 813 - protein, 11 aa, Artificial
  Peptide with targeting and/or antimicrobial activity
HYRWNTQWWKY

SEQ ID NO: 814 - protein, 19 aa, Artificial
  Peptide with targeting and/or antimicrobial activity
YIESDPRKFDYIFGAIRDH

SEQ ID NO: 815 - protein, 23 aa, Artificial
  Peptide with targeting and/or antimicrobial activity
TEIKLDNNEYLVLNLDDILGILK

SEQ ID NO: 816 - protein, 19 aa, Artificial
  Peptide with targeting and/or antimicrobial activity
VFLKLKTSKIDLASIIFYP

SEQ ID NO: 817 - protein, 35 aa, Artificial
  Peptide with targeting and/or antimicrobial activity
GTTLKYGLERQLKIDIHPEITIINLNGGADEFAKL

SEQ ID NO: 818 - protein, 7 aa, Artificial
  Peptide with targeting and/or antimicrobial activity
ADEFAKL

SEQ ID NO: 819 - protein, 6 aa, Artificial
  Peptide with targeting and/or antimicrobial activity
GLDIYA

SEQ ID NO: 820 - protein, 25 aa, Artificial
  Peptide with targeting and/or antimicrobial activity
FLNRFIFYIFTVKTKSALIKNLFLD

SEQ ID NO: 821 - protein, 10 aa, Artificial
  Peptide with targeting and/or antimicrobial activity
IVFVVTKEKK

SEQ ID NO: 822 - protein, 8 aa, Artificial
  Peptide with targeting and/or antimicrobial activity
PMNAAEPE

SEQ ID NO: 823 - protein, 18 aa, Artificial
  Peptide with targeting and/or antimicrobial activity
WSRVPGHSDTGWKVWHRW

SEQ ID NO: 824 - protein, 7 aa, Artificial
  Peptide with targeting and/or antimicrobial activity
PPSSFLV

SEQ ID NO: 825 - protein, 19 aa, Artificial
  Peptide with targeting and/or antimicrobial activity
TREDVFSVRLINNIVNKQA

SEQ ID NO: 826 - protein, 21 aa, Artificial
  Peptide with targeting and/or antimicrobial activity
VLFAVYLGALDWLFSWLTQKM

SEQ ID NO: 827 - protein, 23 aa, Artificial
  Peptide with targeting and/or antimicrobial activity
SDSTNNARTRKKARDVTTKDIDK

SEQ ID NO: 828 - protein, 12 aa, Artificial
  Peptide with targeting and/or antimicrobial activity
KYDFDDFEPEEA

SEQ ID NO: 829 - protein, 13 aa, Artificial
  Peptide with targeting and/or antimicrobial activity
INDLLSYFTLHEK

SEQ ID NO: 830 - protein, 12 aa, Artificial
  Peptide with targeting and/or antimicrobial activity
GLAAIATVFALY

SEQ ID NO: 831 - protein, 9 aa, Artificial
  Peptide with targeting and/or antimicrobial activity
IPATPIIHS

SEQ ID NO: 832 - protein, 18 aa, Artificial
  Peptide with targeting and/or antimicrobial activity
LIIYFSKTGNTARATRQI

SEQ ID NO: 833 - protein, 24 aa, Artificial
  Peptide with targeting and/or antimicrobial activity
TTIQGVASLEKHGFRYTIIYPTRI

SEQ ID NO: 834 - protein, 30 aa, Artificial
  Peptide with targeting and/or antimicrobial activity
MPKARPVNHNKKKSKITIKSNFTLFYMFNP

SEQ ID NO: 835 - protein, 30 aa, Artificial
  Peptide with targeting and/or antimicrobial activity
MNAHGHSLIFQKMIVHAFAFFSKQKNYLYF

SEQ ID NO: 836 - protein, 5 aa, Artificial
  Peptide with targeting and/or antimicrobial activity
LVRLA

SEQ ID NO: 837 - protein, 26 aa, Artificial
  Peptide with targeting and/or antimicrobial activity
SRIKQDARSVRKYDRIGIFFYSFKSA

SEQ ID NO: 838 - protein, 6 aa, Artificial
  Peptide with targeting and/or antimicrobial activity
TFILPK

SEQ ID NO: 839 - protein, 17 aa, Artificial
  Peptide with targeting and/or antimicrobial activity
QATQIKSWIDRLLVSED

SEQ ID NO: 840 - protein, 8 aa, Artificial
  Peptide with targeting and/or antimicrobial activity
MGDINRNF

SEQ ID NO: 841 - protein, 20 aa, Artificial
  Peptide with targeting and/or antimicrobial activity
SWKCHHLAIGGSWKCHHLAI

SEQ ID NO: 842 - protein, 27 aa, Artificial
  Peptide with targeting and/or antimicrobial activity
FTTPMIGIPAGLLGGSYYLKRREEKGK

SEQ ID NO: 843 - protein, 5 aa, Artificial
  Peptide with targeting and/or antimicrobial activity
VRCRL

SEQ ID NO: 844 - protein, 14 aa, Artificial
  Peptide with targeting and/or antimicrobial activity
TSGLIIGENGLNGL

SEQ ID NO: 845 - protein, 7 aa, Artificial
  Peptide with targeting and/or antimicrobial activity
SNSVQQG

SEQ ID NO: 846 - protein, 10 aa, Artificial
  Peptide with targeting and/or antimicrobial activity
APASPGRRPG

SEQ ID NO: 847 - protein, 14 aa, Artificial
  Peptide with targeting and/or antimicrobial activity
GTFLGQKCAAATAS

SEQ ID NO: 848 - protein, 9 aa, Artificial
  Peptide with targeting and/or antimicrobial activity
ARRYPAAGS

SEQ ID NO: 849 - protein, 23 aa, Artificial
  Peptide with targeting and/or antimicrobial activity
CPRYPFVDVGPAGPWRARWRVGS

SEQ ID NO: 850 - protein, 24 aa, Artificial
  Peptide with targeting and/or antimicrobial activity
IRSDQPGRQSRSSPRWPTGAGRHR

SEQ ID NO: 851 - protein, 11 aa, Artificial
  Peptide with targeting and/or antimicrobial activity
PRWPTGAGRHR

SEQ ID NO: 852 - protein, 18 aa, Artificial
  Peptide with targeting and/or antimicrobial activity
FLAPARPDLQAQRQALAQ

SEQ ID NO: 853 - protein, 16 aa, Artificial
  Peptide with targeting and/or antimicrobial activity
QSVHPLPAETPVADVI

SEQ ID NO: 854 - protein, 9 aa, Artificial
  Peptide with targeting and/or antimicrobial activity
LSGRLAGRR

SEQ ID NO: 855 - protein, 17 aa, Artificial
  Peptide with targeting and/or antimicrobial activity
DAPCFDDQFGDLKCQMC

SEQ ID NO: 856 - protein, 14 aa, Artificial
  Peptide with targeting and/or antimicrobial activity
RGMFVPFHDVDCVQ

SEQ ID NO: 857 - protein, 25 aa, Artificial
  Peptide with targeting and/or antimicrobial activity
YVANYTITQFGRDFDDRLAVAIHFA

SEQ ID NO: 858 - protein, 21 aa, Artificial
  Peptide with targeting and/or antimicrobial activity
PTTPPPTTPPEIPTGGTVIST

SEQ ID NO: 859 - protein, 5 aa, Artificial
  Peptide with targeting and/or antimicrobial activity
TVIST

SEQ ID NO: 860 - protein, 16 aa, Artificial
  Peptide with targeting and/or antimicrobial activity
TDPQATAAPRRRTSPR

SEQ ID NO: 861 - protein, 23 aa, Artificial
  Peptide with targeting and/or antimicrobial activity
PDEDIRRRAILPPAGPCRPMSPE

SEQ ID NO: 862 - protein, 21 aa, Artificial
  Peptide with targeting and/or antimicrobial activity
GKQSRAHGPVASRREFRRKSG

SEQ ID NO: 863 - protein, 8 aa, Artificial
  Peptide with targeting and/or antimicrobial activity
ATLIPRKA

SEQ ID NO: 864 - protein, 14 aa, Artificial
  Peptide with targeting and/or antimicrobial activity
DQLCVEYPARVSTG

SEQ ID NO: 865 - protein, 15 aa, Artificial
  Peptide with targeting and/or antimicrobial activity
VLRVATAVGEVPTGL

SEQ ID NO: 866 - protein, 8 aa, Artificial
  Peptide with targeting and/or antimicrobial activity
PNRRSRPR

SEQ ID NO: 867 - protein, 24 aa, Artificial
  Peptide with targeting and/or antimicrobial activity
PAHQRLRIDQRLVADRDMVQDYES

SEQ ID NO: 868 - protein, 24 aa, Artificial
  Peptide with targeting and/or antimicrobial activity
TNAESMALAFRGRVHMSVNIAGLT

SEQ ID NO: 869 - protein, 24 aa, Artificial
  Peptide with targeting and/or antimicrobial activity
RADRIESYPADGDRVITLWRNPYR

SEQ ID NO: 870 - protein, 11 aa, Artificial
  Peptide with targeting and/or antimicrobial activity
TVIVAPMHSGV

SEQ ID NO: 871 - protein, 9 aa, Artificial
  Peptide with targeting and/or antimicrobial activity
TVSAFRTVH

SEQ ID NO: 872 - protein, 6 aa, Artificial
  Peptide with targeting and/or antimicrobial activity
VRRLRM

SEQ ID NO: 873 - protein, 12 aa, Artificial
  Peptide with targeting and/or antimicrobial activity
DGCDSEPALTYR

SEQ ID NO: 874 - protein, 24 aa, Artificial
  Peptide with targeting and/or antimicrobial activity
EIIPISPTRRCEMHTMSSAEYRGL

SEQ ID NO: 875 - protein, 6 aa, Artificial
  Peptide with targeting and/or antimicrobial activity
AEYRGL

SEQ ID NO: 876 - protein, 8 aa, Artificial
  Peptide with targeting and/or antimicrobial activity
TCRGAGMH

SEQ ID NO: 877 - protein, 19 aa, Artificial
  Peptide with targeting and/or antimicrobial activity
RDRRWTRRDMYDWLESARV

SEQ ID NO: 878 - protein, 8 aa, Artificial
  Peptide with targeting and/or antimicrobial activity
CRARFIRR

SEQ ID NO: 879 - protein, 9 aa, Artificial
  Peptide with targeting and/or antimicrobial activity
ADPHPTTGI

SEQ ID NO: 880 - protein, 23 aa, Artificial
  Peptide with targeting and/or antimicrobial activity
TALTTVGVSGARLITYCVGVEDI

SEQ ID NO: 881 - protein, 12 aa, Artificial
  Peptide with targeting and/or antimicrobial activity
RRGKSEQGLSRR

SEQ ID NO: 882 - protein, 5 aa, Artificial
  Peptide with targeting and/or antimicrobial activity
LWPVA

SEQ ID NO: 883 - protein, 17 aa, Artificial
  Peptide with targeting and/or antimicrobial activity
RKLSLASGFALWRRSLV

SEQ ID NO: 884 - protein, 8 aa, Artificial
  Peptide with targeting and/or antimicrobial activity
PTLWLACL

SEQ ID NO: 885 - protein, 22 aa, Artificial
  Peptide with targeting and/or antimicrobial activity
LAVLMGYIGYRGWSGKRHINRQ

SEQ ID NO: 886 - protein, 20 aa, Artificial
  Peptide with targeting and/or antimicrobial activity
AKRVLSLAVAPHRRQPVQGT

SEQ ID NO: 887 - protein, 10 aa, Artificial
  Peptide with targeting and/or antimicrobial activity
ARNHAVIPAG

SEQ ID NO: 888 - protein, 5 aa, Artificial
  Peptide with targeting and/or antimicrobial activity
SAPSG

SEQ ID NO: 889 - protein, 30 aa, Artificial
  Peptide with targeting and/or antimicrobial activity
MIPLAGDPVSSHRTVEFGVLGTYLVSGGSL

SEQ ID NO: 890 - protein, 19 aa, Artificial
  Peptide with targeting and/or antimicrobial activity
HRTVEFGVLGTYLVSGGSL

SEQ ID NO: 891 - protein, 21 aa, Artificial
  Peptide with targeting and/or antimicrobial activity
GVAREDPLEPDPLAPIIDDSR

SEQ ID NO: 892 - protein, 5 aa, Artificial
  Peptide with targeting and/or antimicrobial activity
PDPAR

SEQ ID NO: 893 - protein, 15 aa, Artificial
  Peptide with targeting and/or antimicrobial activity
DLIRPLYSMSAPSVA

SEQ ID NO: 894 - protein, 19 aa, Artificial
  Peptide with targeting and/or antimicrobial activity
ALSVMLGNIPLVVPNANQL

SEQ ID NO: 895 - protein, 14 aa, Artificial
  Peptide with targeting and/or antimicrobial activity
IRSGISAAYARPLR

SEQ ID NO: 896 - protein, 7 aa, Artificial
  Peptide with targeting and/or antimicrobial activity
RADARAK

SEQ ID NO: 897 - protein, 15 aa, Artificial
  Peptide with targeting and/or antimicrobial activity
SSGRAGVKCRRPTGR

SEQ ID NO: 898 - protein, 13 aa, Artificial
  Peptide with targeting and/or antimicrobial activity
GRAGVKCRRPTGR

SEQ ID NO: 899 - protein, 8 aa, Artificial
  Peptide with targeting and/or antimicrobial activity
LNWPFTGR

SEQ ID NO: 900 - protein, 9 aa, Artificial
  Peptide with targeting and/or antimicrobial activity
PRGAQSGHG

SEQ ID NO: 901 - protein, 9 aa, Artificial
  Peptide with targeting and/or antimicrobial activity
LSGRLAGRR

SEQ ID NO: 902 - protein, 30 aa, Artificial
  Peptide with targeting and/or antimicrobial activity
MTTVDNIVGLVIAVALMAFLFAALLFPEKF

SEQ ID NO: 903 - protein, 8 aa, Artificial
  Peptide with targeting and/or antimicrobial activity
APAARAAL

SEQ ID NO: 904 - protein, 9 aa, Artificial
  Peptide with targeting and/or antimicrobial activity
GEEEGTVAD

SEQ ID NO: 905 - protein, 20 aa, Artificial
  Peptide with targeting and/or antimicrobial activity
LGYGAWIGCGLGLNGFHRID

SEQ ID NO: 906 - protein, 19 aa, Artificial
  Peptide with targeting and/or antimicrobial activity
IDPESIVTTNNKQDNVDEQ

SEQ ID NO: 907 - protein, 8 aa, Artificial
  Peptide with targeting and/or antimicrobial activity
NKKHSPMD

SEQ ID NO: 908 - protein, 13 aa, Artificial
  Peptide with targeting and/or antimicrobial activity
KTAGPTGTIYKTN

SEQ ID NO: 909 - protein, 19 aa, Artificial
  Peptide with targeting and/or antimicrobial activity
QIYRHVHKVQAKSANLRLY

SEQ ID NO: 910 - protein, 13 aa, Artificial
  Peptide with targeting and/or antimicrobial activity
FVVTQRMLRMYKK

SEQ ID NO: 911 - protein, 21 aa, Artificial
  Peptide with targeting and/or antimicrobial activity
HGENHHHKSDEKDNDSSEKKD

SEQ ID NO: 912 - protein, 23 aa, Artificial
  Peptide with targeting and/or antimicrobial activity
PQSEVTFENIYAPKANGGGLYGI

SEQ ID NO: 913 - protein, 6 aa, Artificial
  Peptide with targeting and/or antimicrobial activity
SLDMGK

SEQ ID NO: 914 - protein, 14 aa, Artificial
  Peptide with targeting and/or antimicrobial activity
CYRFLTPKRPTRIS

SEQ ID NO: 915 - protein, 19 aa, Artificial
  Peptide with targeting and/or antimicrobial activity
AYARCRHDYPFTLGQMQTH

SEQ ID NO: 916 - protein, 21 aa, Artificial
  Peptide with targeting and/or antimicrobial activity
AIGQEQDRREYYYYSGYPYYY

SEQ ID NO: 917 - protein, 22 aa, Artificial
  Peptide with targeting and/or antimicrobial activity
RHKLIRLPLSESVFCFLNNPKI

SEQ ID NO: 918 - protein, 20 aa, Artificial
  Peptide with targeting and/or antimicrobial activity
DRPSQTTHHTLSSSRITGPS

SEQ ID NO: 919 - protein, 18 aa, Artificial
  Peptide with targeting and/or antimicrobial activity
VISRQMGSEAVLELFIIM

SEQ ID NO: 920 - protein, 10 aa, Artificial
  Peptide with targeting and/or antimicrobial activity
YDPLFPNDKN

SEQ ID NO: 921 - protein, 19 aa, Artificial
  Peptide with targeting and/or antimicrobial activity
KSSGSSASASSTAGGSSSK

SEQ ID NO: 922 - protein, 17 aa, Artificial
  Peptide with targeting and/or antimicrobial activity
KSGATSAASGAKSGASS

SEQ ID NO: 923 - protein, 20 aa, Artificial
  Peptide with targeting and/or antimicrobial activity
AKREDTVAAQIGANILNLIQ

SEQ ID NO: 924 - protein, 25 aa, Artificial
  Peptide with targeting and/or antimicrobial activity
LGVGTFVGKVLIKNQQKQKSKKKAQ

SEQ ID NO: 925 - protein, 38 aa, Artificial
  Peptide with targeting and/or antimicrobial activity
ANSQNSLFSNRSSFKSIFDKKSNITTNATTPNSNIIIN

SEQ ID NO: 926 - protein, 11 aa, Artificial
  Peptide with targeting and/or antimicrobial activity
FLGNSQYFTRK

SEQ ID NO: 927 - protein, 40 aa, Artificial
  Peptide with targeting and/or antimicrobial activity
FQGFFDVAVNKWWEEHNKAKLWKNVKGKFLEGEGEEEDDE

SEQ ID NO: 928 - protein, 33 aa, Artificial
  Peptide with targeting and/or antimicrobial activity
GVNKWWEEHNKAKLWKNVKGKFLEGEGEEEDDE

SEQ ID NO: 929 - protein, 10 aa, Artificial
  Peptide with targeting and/or antimicrobial activity
AESSPAKTTA

SEQ ID NO: 930 - protein, 10 aa, Artificial
  Peptide with targeting and/or antimicrobial activity
AESSPAQETT

SEQ ID NO: 931 - protein, 30 aa, Artificial
  Peptide with targeting and/or antimicrobial activity
LHVIRPRPELSELKFPITKILKVNKQGLKK

SEQ ID NO: 932 - protein, 7 aa, Artificial
  Peptide with targeting and/or antimicrobial activity
DALLRLA

SEQ ID NO: 933 - protein, 11 aa, Artificial
  Peptide with targeting and/or antimicrobial activity
PQAISSVQQNA

SEQ ID NO: 934 - protein, 11 aa, Artificial
  Peptide with targeting and/or antimicrobial activity
PEIIKIVSGLL

SEQ ID NO: 935 - protein, 21 aa, Artificial
  Peptide with targeting and/or antimicrobial activity
DHITLDDYEIHDGFNFELYYG

SEQ ID NO: 936 - protein, 32 aa, Artificial
  Peptide with targeting and/or antimicrobial activity
SKFELVNYASGCSCGADCKCASETECKCASKK

SEQ ID NO: 937 - protein, 19 aa, Artificial
  Peptide with targeting and/or antimicrobial activity
PAPAPSAPAPAPEQPEQPA

SEQ ID NO: 938 - protein, 43 aa, Artificial
  Peptide with targeting and/or antimicrobial activity
GIWMARNYFHRSSIRKVYVESDKEYERVHPMQKIQYEGNYKSQ

SEQ ID NO: 939 - protein, 9 aa, Artificial
  Peptide with targeting and/or antimicrobial activity
GYFEPGKRD

SEQ ID NO: 940 - protein, 32 aa, Artificial
  Peptide with targeting and/or antimicrobial activity
YLYWEVEHKPIIAKRDAYYAQLRKQKEIEEGA

SEQ ID NO: 941 - protein, 17 aa, Artificial
  Peptide with targeting and/or antimicrobial activity
DAYYAQLRKQKEIEEGA

SEQ ID NO: 942 - protein, 15 aa, Artificial
  Peptide with targeting and/or antimicrobial activity
DGKQGEPVALKPTDN

SEQ ID NO: 943 - protein, 12 aa, Artificial
  Peptide with targeting and/or antimicrobial activity
GFRGGKRGGARG

SEQ ID NO: 944 - protein, 28 aa, Artificial
  Peptide with targeting and/or antimicrobial activity
GVGIGFIMMGVVGYAVKLVHIPIRYLIV

SEQ ID NO: 945 - protein, 6 aa, Artificial
  Peptide with targeting and/or antimicrobial activity
TKESSS

SEQ ID NO: 946 - protein, 6 aa, Artificial
  Peptide with targeting and/or antimicrobial activity
TLKESK

SEQ ID NO: 947 - protein, 29 aa, Artificial
  Peptide with targeting and/or antimicrobial activity
VSILLYLSATIILPNVLRLLVARAIIVRV

SEQ ID NO: 948 - protein, 20 aa, Artificial
  Peptide with targeting and/or antimicrobial activity
PGADGKLAEASAAIARLVRS

SEQ ID NO: 949 - protein, 10 aa, Artificial
  Peptide with targeting and/or antimicrobial activity
MNLILTAHGT

SEQ ID NO: 950 - protein, 42 aa, Artificial
  Peptide with targeting and/or antimicrobial activity
IYGDFFNFYLCDISLKVNGLQPGGPVRTVKLFGQPTGRCTPQ

SEQ ID NO: 951 - protein, 40 aa, Artificial
  Peptide with targeting and/or antimicrobial activity
AVYDALVALAAAEHRAELATRDARAKDTYEKIGVHVVVAA

SEQ ID NO: 952 - protein, 15 aa, Artificial
  Peptide with targeting and/or antimicrobial activity
PLVVVNHRRAERSRG

SEQ ID NO: 953 - protein, 29 aa, Artificial
  Peptide with targeting and/or antimicrobial activity
TGPRRGIDLTSNRALSEVLDEGLELNSRK

SEQ ID NO: 954 - protein, 37 aa, Artificial
  Peptide with targeting and/or antimicrobial activity
FTSEVRGVFTYRVNKAGLITNMRGYWNLDMMTFGNQE

SEQ ID NO: 955 - protein, 32 aa, Artificial
  Peptide with targeting and/or antimicrobial activity
MAMTTVDNIVGLVIAVALMAFLFAALLFPEKF

SEQ ID NO: 956 - protein, 22 aa, Artificial
  Peptide with targeting and/or antimicrobial activity
MRPQHSPAGKAFVVKKITHEQS

SEQ ID NO: 957 - protein, 14 aa, Artificial
  Peptide with targeting and/or antimicrobial activity
LSERERRRLKRGII

SEQ ID NO: 958 - protein, 34 aa, Artificial
  Peptide with targeting and/or antimicrobial activity
MTERQRRALLKQHPEVVSWSDYLEKRKRRTGTAG

SEQ ID NO: 959 - protein, 28 aa, Artificial
  Peptide with targeting and/or antimicrobial activity
GLITVFAGTARILQLRRAAKKTHAAALR

SEQ ID NO: 960 - protein, 9 aa, Artificial
  Peptide with targeting and/or antimicrobial activity
PRGAQSGHG

SEQ ID NO: 961 - protein, 13 aa, Artificial
  Peptide with targeting and/or antimicrobial activity
PAGPDHLDQRDHR

SEQ ID NO: 962 - protein, 16 aa, Artificial
  Peptide with targeting and/or antimicrobial activity
IFLTTQNTDYSEHNAA

SEQ ID NO: 963 - protein, 10 aa, Artificial
  Peptide with targeting and/or antimicrobial activity
ALHASGIQAI

SEQ ID NO: 964 - protein, 21 aa, Artificial
  Peptide with targeting and/or antimicrobial activity
  MOD_RES (4)..(4): Aib
YTQXNNASAYAMLLTNKDTVP

SEQ ID NO: 965 - protein, 9 aa, Artificial
  Peptide with targeting and/or antimicrobial activity
NLYFENQGN

SEQ ID NO: 966 - protein, 20 aa, Artificial
  Peptide with targeting and/or antimicrobial activity
ALHKSGIQVIADWVPDQIYN

SEQ ID NO: 967 - protein, 20 aa, Artificial
  Peptide with targeting and/or antimicrobial activity
YTQSNIPTAYALMLSNKDSI

SEQ ID NO: 968 - protein, 10 aa, Artificial
  Peptide with targeting and/or antimicrobial activity
WYYFDNNGYM

SEQ ID NO: 969 - protein, 20 aa, Artificial
  Peptide with targeting and/or antimicrobial activity
ALHSKGIKVMADWVPDQMYA

SEQ ID NO: 970 - protein, 21 aa, Artificial
  Peptide with targeting and/or antimicrobial activity
YTHYNTALSYALLLTNKSSVP

SEQ ID NO: 971 - protein, 10 aa, Artificial
  Peptide with targeting and/or antimicrobial activity
WYYFDNNGYM

SEQ ID NO: 972 - protein, 22 aa, Artificial
  Peptide with targeting and/or antimicrobial activity
FCSVDHDVITIAADHVKQGAEA

SEQ ID NO: 973 - protein, 27 aa, Artificial
  Peptide with targeting and/or antimicrobial activity
AQPRRTWLVNFGEVPSPGLTNDGMPDH

SEQ ID NO: 974 - protein, 21 aa, Artificial
  Peptide with targeting and/or antimicrobial activity
HPMPITVRSRKPGPLTAPSEH

SEQ ID NO: 975 - protein, 26 aa, Artificial
  Peptide with targeting and/or antimicrobial activity
FREGMGWPLSNEGSPTAPLPKHRNQV

SEQ ID NO: 976 - protein, 13 aa, Artificial
  Peptide with targeting and/or antimicrobial activity
QGLARPVLRRIPL

SEQ ID NO: 977 - protein, 7 aa, Artificial
  Peptide with targeting and/or antimicrobial activity
SRFRNGV

SEQ ID NO: 978 - protein, 25 aa, Artificial
  Peptide with targeting and/or antimicrobial activity
YNLSIYIYFLHTITIAGLITLPFII

SEQ ID NO: 979 - protein, 27 aa, Artificial
  Peptide with targeting and/or antimicrobial activity
YFWWYWVQDCIPYKNNEVWLELSNNMK

SEQ ID NO: 980 - protein, 36 aa, Artificial
  Peptide with targeting and/or antimicrobial activity
FETGFGDGYYMSLWGLNEKDEVCKVVIPFINPELID

SEQ ID NO: 981 - protein, 33 aa, Artificial
  Peptide with targeting and/or antimicrobial activity
TLNYKKMFFSVIFLLGLNYLICNSPLFFKQIEF

SEQ ID NO: 982 - protein, 24 aa, Artificial
  Peptide with targeting and/or antimicrobial activity
PLARATEVVATLFIICSLLLYLTR

SEQ ID NO: 983 - protein, 7 aa, Artificial
  Peptide with targeting and/or antimicrobial activity
SHFRKGD

SEQ ID NO: 984 - protein, 24 aa, Artificial
  Peptide with targeting and/or antimicrobial activity
DEEALEMGANLYAQFAIDFLNSKK

SEQ ID NO: 985 - protein, 40 aa, Artificial
  Peptide with targeting and/or antimicrobial activity
DEERYSDSYFLKEKVFYLILALFLILFHQKYLYFLEIITI

SEQ ID NO: 986 - protein, 7 aa, Artificial
  Peptide with targeting and/or antimicrobial activity
LNLFASI

SEQ ID NO: 987 - protein, 28 aa, Artificial
  Peptide with targeting and/or antimicrobial activity
NALMLREMQLAKNIKVEVTDVLSNKKYC

SEQ ID NO: 988 - protein, 7 aa, Artificial
  Peptide with targeting and/or antimicrobial activity
QVIVKIL

SEQ ID NO: 989 - protein, 41 aa, Artificial
  Peptide with targeting and/or antimicrobial activity
KKMFSLIRKVNWIFFILFIVLDLTNVFPLIRTILFAILSRQ

SEQ ID NO: 990 - protein, 26 aa, Artificial
  Peptide with targeting and/or antimicrobial activity
KALVISVFAIVFSIIFVKFFYWRDKK

SEQ ID NO: 991 - protein, 7 aa, Artificial
  Peptide with targeting and/or antimicrobial activity
INIPGLF

SEQ ID NO: 992 - protein, 24 aa, Artificial
  Peptide with targeting and/or antimicrobial activity
FFSVIFLFGLNYLICNSPLFNILR

SEQ ID NO: 993 - protein, 25 aa, Artificial
  Peptide with targeting and/or antimicrobial activity
KKFKIFVIINWFYHKYIILNFEENF

SEQ ID NO: 994 - protein, 30 aa, Artificial
  Peptide with targeting and/or antimicrobial activity
ELFFTILSDCNELFLLHLLQQPLFYIKKGK

SEQ ID NO: 995 - protein, 17 aa, Artificial
  Peptide with targeting and/or antimicrobial activity
DIANNILNSVSERLIIA

SEQ ID NO: 996 - protein, 31 aa, Artificial
  Peptide with targeting and/or antimicrobial activity
ASNTPRFVRLTLFNFYSKIWNVTHLFLFNNL

SEQ ID NO: 997 - protein, 7 aa, Artificial
  Peptide with targeting and/or antimicrobial activity
EKLGTMV

SEQ ID NO: 998 - protein, 35 aa, Artificial
  Peptide with targeting and/or antimicrobial activity
LLALNMNEDTYYFELFFIFDNQNKKWLIFDLKERG

SEQ ID NO: 999 - protein, 36 aa, Artificial
  Peptide with targeting and/or antimicrobial activity
PETKGKVSAFVFGIVVANVIAVVYILYMLREIGIIQ

SEQ ID NO: 1000 - protein, 33 aa, Artificial
  Peptide with targeting and/or antimicrobial activity
ASLSTMTFKVMELKELIILLCGLTMLMIQTEFV

SEQ ID NO: 1001 - protein, 27 aa, Artificial
  Peptide with targeting and/or antimicrobial activity
QWIVAKREIRMHIYCHISVIHVIIFFG

SEQ ID NO: 1002 - protein, 29 aa, Artificial
  Peptide with targeting and/or antimicrobial activity
NELMKYPATLTATATTPGIKYSHLCSVCL

SEQ ID NO: 1003 - protein, 36 aa, Artificial
  Peptide with targeting and/or antimicrobial activity
KNTHAYLRVLRLSSLILSYQASVYPLFAYLCQQKDY

SEQ ID NO: 1004 - protein, 22 aa, Artificial
  Peptide with targeting and/or antimicrobial activity
LILSYQASVYPLFAYLCQQKDY

SEQ ID NO: 1005 - protein, 25 aa, Artificial
  Peptide with targeting and/or antimicrobial activity
QRMYWFKRGFETGDFSAGDTFAELK

SEQ ID NO: 1006 - protein, 27 aa, Artificial
  Peptide with targeting and/or antimicrobial activity
LLASHPERLSLGVFFVYRVLHLLLENT

SEQ ID NO: 1007 - protein, 28 aa, Artificial
  Peptide with targeting and/or antimicrobial activity
DFPPLSFFRRRFHAYTAPIDNFFGANPF

SEQ ID NO: 1008 - protein, 10 aa, Artificial
  Peptide with targeting and/or antimicrobial activity
VVFGGGDRLV

SEQ ID NO: 1009 - protein, 7 aa, Artificial
  Peptide with targeting and/or antimicrobial activity
YGKESDP

SEQ ID NO: 1010 - protein, 17 aa, Artificial
  Peptide with targeting and/or antimicrobial activity
AASGFTYCASNGVWHPY

SEQ ID NO: 1011 - protein, 40 aa, Artificial
  Peptide with targeting and/or antimicrobial activity
TVEELDKAFTWGAAAALAIGVIAINVGLAAGYCYNNNDVF

SEQ ID NO: 1012 - protein, 33 aa, Artificial
  Peptide with targeting and/or antimicrobial activity
KMRAGQVVFIYKLILVLLFYVLQKLFDLKKGCF

SEQ ID NO: 1013 - protein, 41 aa, Artificial
  Peptide with targeting and/or antimicrobial activity
NTNDLLQAFELMGLGMAGVFIVLGILYIVAELLIKIFPVNN

SEQ ID NO: 1014 - protein, 11 aa, Artificial
  Peptide with targeting and/or antimicrobial activity
AEIQPHCLSVL

SEQ ID NO: 1015 - protein, 13 aa, Artificial
  Peptide with targeting and/or antimicrobial activity
FFPSYYSIIITYF

SEQ ID NO: 1016 - protein, 31 aa, Artificial
  Peptide with targeting and/or antimicrobial activity
KNMLKRRMKQKRLFDEEDRLRVLSKYTKSYY

SEQ ID NO: 1017 - protein, 30 aa, Artificial
  Peptide with targeting and/or antimicrobial activity
KKEKLLTAIRLQHRAEIRGYFTIFFLFFRI

SEQ ID NO: 1018 - protein, 32 aa, Artificial
  Peptide with targeting and/or antimicrobial activity
FTIIELKKQKIKHGENNKKTAHPLNEPFCARA

SEQ ID NO: 1019 - protein, 30 aa, Artificial
  Peptide with targeting and/or antimicrobial activity
GNVHPESDFHNLIQFIKTFLYFTIFFKYFL

SEQ ID NO: 1020 - protein, 29 aa, Artificial
  Peptide with targeting and/or antimicrobial activity
HPFLTGTGCPLFLIFRLFFVKAYFSFTVF

SEQ ID NO: 1021 - protein, 32 aa, Artificial
  Peptide with targeting and/or antimicrobial activity
ALALLKQDLLNFEGRGRIITSTYLQFNEGCVP

SEQ ID NO: 1022 - protein, 31 aa, Artificial
  Peptide with targeting and/or antimicrobial activity
VLLNIFRTLLEFFSPSNAPGAEDVPLPDTQA

SEQ ID NO: 1023 - protein, 34 aa, Artificial
  Peptide with targeting and/or antimicrobial activity
VVAGVVLLTALAVGSKRKEKKQIKEIQRLLAATR

SEQ ID NO: 1024 - protein, 12 aa, Artificial
  Peptide with targeting and/or antimicrobial activity
IENLERGARRPP

SEQ ID NO: 1025 - protein, 10 aa, Artificial
  Peptide with targeting and/or antimicrobial activity
GMPQIPRLRI

SEQ ID NO: 1026 - protein, 26 aa, Artificial
  Peptide with targeting and/or antimicrobial activity
MAEDERRALKRRTNRGRTRTRKRITV

SEQ ID NO: 1027 - protein, 24 aa, Artificial
  Peptide with targeting and/or antimicrobial activity
TELKYNGEEYLLLTQRDILAVIEK

SEQ ID NO: 1028 - protein, 32 aa, Artificial
  Peptide with targeting and/or antimicrobial activity
TSDTQSQSPWLFDNADIVNIYPVQLMHSSDND

SEQ ID NO: 1029 - protein, 17 aa, Artificial
  Peptide with targeting and/or antimicrobial activity
GLGRVIGRLIKQIIWRR

SEQ ID NO: 1030 - protein, 19 aa, Artificial
  Peptide with targeting and/or antimicrobial activity
VYRKRKSILKIYAKLKGWH

SEQ ID NO: 1031 - protein, 20 aa, Artificial
  Peptide with targeting and/or antimicrobial activity
NYRLVNAIFSKIFKKKFIKF

SEQ ID NO: 1032 - protein, 11 aa, Artificial
  Peptide with targeting and/or antimicrobial activity
KILKFLFKKVF

SEQ ID NO: 1033 - protein, 11 aa, Artificial
  Peptide with targeting and/or antimicrobial activity
FIRKFLKKWLL

SEQ ID NO: 1034 - protein, 11 aa, Artificial
  Peptide with targeting and/or antimicrobial activity
KLFKFLRKHLL

SEQ ID NO: 1035 - protein, 11 aa, Artificial
  Peptide with targeting and/or antimicrobial activity
KILKFLFKQVF

SEQ ID NO: 1036 - protein, 11 aa, Artificial
  Peptide with targeting and/or antimicrobial activity
KILKKLFKFVF

SEQ ID NO: 1037 - protein, 11 aa, Artificial
  Peptide with targeting and/or antimicrobial activity
GILKKLFTKVF

SEQ ID NO: 1038 - protein, 9 aa, Artificial
  Peptide with targeting and/or antimicrobial activity
LRKFLHKLF

SEQ ID NO: 1039 - protein, 9 aa, Artificial
  Peptide with targeting and/or antimicrobial activity
LRKNLRWLF

SEQ ID NO: 1040 - protein, 11 aa, Artificial
  Peptide with targeting and/or antimicrobial activity
FIRKFLQKLHL

SEQ ID NO: 1041 - protein, 11 aa, Artificial
  Peptide with targeting and/or antimicrobial activity
FTRKFLKFLHL

SEQ ID NO: 1042 - protein, 12 aa, Artificial
  Peptide with targeting and/or antimicrobial activity
KKFKKFKVLKIL

SEQ ID NO: 1043 - protein, 12 aa, Artificial
  Peptide with targeting and/or antimicrobial activity
LLKLLKLKKLKF

SEQ ID NO: 1044 - protein, 14 aa, Artificial
  Peptide with targeting and/or antimicrobial activity
FLKFLKKFFKKLKY

SEQ ID NO: 1045 - protein, 16 aa, Artificial
  Peptide with targeting and/or antimicrobial activity
GWLKMFKKIIGKFGKF

SEQ ID NO: 1046 - protein, 16 aa, Artificial
  Peptide with targeting and/or antimicrobial activity
GIFKKFVKILYKVQKL

SEQ ID NO: 1047 - protein, 24 aa, Artificial
  Peptide with targeting and/or antimicrobial activity
GRLVLEITADEVKALGEALANAKI

SEQ ID NO: 1048 - protein, 21 aa, Artificial
  Peptide with targeting and/or antimicrobial activity
YIQFHLNQQPRPKVKKIKIFL

SEQ ID NO: 1049 - protein, 32 aa, Artificial; identical to SEQ ID NO: 750
  Peptide with targeting and/or antimicrobial activity

SEQ ID NO: 1050 - protein, 30 aa, Artificial
  Peptide with targeting and/or antimicrobial activity
MRFGSLALVAYDSAIKHSWPRPSSVRRLRM

SEQ ID NO: 1051 - protein, 39 aa, Artificial
  Peptide with targeting and/or antimicrobial activity
FESKILNASKELDKEKKVNTALSFNSHQDFAKAYQNGKI

SEQ ID NO: 1052 - protein, 18 aa, Artificial
  Peptide with targeting and/or antimicrobial activity
WSRVPGHSDTGWKVWHRW

SEQ ID NO: 1053 - protein, 21 aa, Artificial
  Peptide with targeting and/or antimicrobial activity
MGIIAGIIKFIKGLIEKFTGK

SEQ ID NO: 1054 - protein, 16 aa, Artificial
  Peptide with targeting and/or antimicrobial activity
RESKLIAMADMIRRRI

SEQ ID NO: 1055 - protein, 24 aa, Artificial
  Peptide with targeting and/or antimicrobial activity
LSLATFAKIFMTRSNWSLKRFNRL

SEQ ID NO: 1056 - protein, 30 aa, Artificial; identical to SEQ ID NO: 544
  Peptide with targeting and/or antimicrobial activity

SEQ ID NO: 1057 - protein, 37 aa, Artificial; identical to SEQ ID NO: 560
  Peptide with targeting and/or antimicrobial activity

SEQ ID NO: 1058 - protein, 28 aa, Artificial
  Peptide with targeting and/or antimicrobial activity
VLPFPAIPLSRRRACVAAPRPRSRQRAS

SEQ ID NO: 1059 - protein, 30 aa, Artificial
  Peptide with targeting and/or antimicrobial activity
KNKKQTDILEKVKEILDKKKKTKSVGQKLY

SEQ ID NO: 1060 - protein, 15 aa, Artificial
  Peptide with targeting and/or antimicrobial activity
SLQSQLGPCLHDQRH

SEQ ID NO: 1061 - protein, 28 aa, Artificial
  Peptide with targeting and/or antimicrobial activity
KFQGEFTNIGQSYIVSASHMSTSLNTGK

SEQ ID NO: 1062 - protein, 41 aa, Artificial; identical to SEQ ID NO: 808
  Peptide with targeting and/or antimicrobial activity

SEQ ID NO: 1063 - protein, 20 aa, Artificial
  Peptide with targeting and/or antimicrobial activity
KFSDQIDKGQDALKDKLGDL

SEQ ID NO: 1064 - protein, 13 aa, Artificial
  Peptide with targeting and/or antimicrobial activity
LSEMERRRLRKRA

SEQ ID NO: 1065 - protein, 25 aa, Artificial
  Peptide with targeting and/or antimicrobial activity
RRGCTERLRRMARRNAWDLYAEHFY

SEQ ID NO: 1066 - protein, 26 aa, Artificial
  Peptide with targeting and/or antimicrobial activity
SKFKVLRKIIIKEYKGELMLSIQKQR

SEQ ID NO: 1067 - protein, 20 aa, Artificial
  Peptide with targeting and/or antimicrobial activity
FELVDWLETNLGKILKSKSA

SEQ ID NO: 1068 - protein, 22 aa, Artificial
  Peptide with targeting and/or antimicrobial activity
LVLRICTDLFTFIKWTIKQRKS

SEQ ID NO: 1069 - protein, 24 aa, Artificial
  Peptide with targeting and/or antimicrobial activity
VYSFLYVLVIVRKLLSMKKRIERL

SEQ ID NO: 1070 - protein, 18 aa, Artificial
  Peptide with targeting and/or antimicrobial activity
GIVLIGLKLIPLLANVLR

SEQ ID NO: 1071 - protein, 21 aa, Artificial
  Peptide with targeting and/or antimicrobial activity
VMQSLYVKPPLILVTKLAQQN

SEQ ID NO: 1072 - protein, 16 aa, Artificial
  Peptide with targeting and/or antimicrobial activity
SFMPEIQKNTIPTQMK

SEQ ID NO: 1073 - protein, 39 aa, Artificial; identical to SEQ ID NO: 744
  Peptide with targeting and/or antimicrobial activity

SEQ ID NO: 1074 - protein, 15 aa, Artificial
  Peptide with targeting and/or antimicrobial activity
CGKLLEQKNFFLKTR

SEQ ID NO: 1075 - protein, 30 aa, Artificial; identical to SEQ ID NO: 747
  Peptide with targeting and/or antimicrobial activity

SEQ ID NO: 1076 - protein, 24 aa, Artificial
  Peptide with targeting and/or antimicrobial activity
PDAPRTCYHKPILAALSRIVVTDR

SEQ ID NO: 1077 - protein, 8 aa, Artificial
  Peptide with targeting and/or antimicrobial activity
NYAVVSHT

SEQ ID NO: 1078 - protein, 23 aa, Artificial
  Peptide with targeting and/or antimicrobial activity
FQKPFTGEEVEDFQDDDEIPTII

SEQ ID NO: 1079 - protein, 25 aa, Artificial
  Peptide with targeting and/or antimicrobial activity
DSSQSDSDSDSNSSNTNSNSSITNG

SEQ ID NO: 1080 - protein, 25 aa, Artificial
  Peptide with targeting and/or antimicrobial activity
LPGTLHIQAEFPVQLEAGSLIQIFD

SEQ ID NO: 1081 - protein, 24 aa, Artificial
  Peptide with targeting and/or antimicrobial activity
EIPIQLANDLANYYDISLDSIFFW

SEQ ID NO: 1082 - protein, 20 aa, Artificial
  Peptide with targeting and/or antimicrobial activity
RDMTVAGKRPNFLIITTDEE

SEQ ID NO: 1083 - protein, 31 aa, Artificial
  Peptide with targeting and/or antimicrobial activity
NTSIVCAVTFAPIKEVPLLWRAGLTLRSRQS

SEQ ID NO: 1084 - protein, 29 aa, Artificial
  Peptide with targeting and/or antimicrobial activity
QAKVEREVERDLVYTLRRLCDPSGSERTK

SEQ ID NO: 1085 - protein, 29 aa, Artificial
  Peptide with targeting and/or antimicrobial activity
PRMIDIISFHGCHGDHQVWTDPQATALPR

SEQ ID NO: 1086 - protein, 30 aa, Artificial; identical to SEQ ID NO: 326
  Peptide with targeting and/or antimicrobial activity

SEQ ID NO: 1087 - protein, 5 aa, Artificial
  Peptide with targeting and/or antimicrobial activity
NDDAQ

SEQ ID NO: 1088 - protein, 30 aa, Artificial; identical to SEQ ID NO: 328
  Peptide with targeting and/or antimicrobial activity

SEQ ID NO: 1089 - protein, 23 aa, Artificial
  Peptide with targeting and/or antimicrobial activity
ARLSKAIIIAVIVVYHLDVRGLF

SEQ ID NO: 1090 - protein, 30 aa, Artificial; identical to SEQ ID NO: 330
  Peptide with targeting and/or antimicrobial activity

SEQ ID NO: 1091 - protein, 21 aa, Artificial
  Peptide with targeting and/or antimicrobial activity
MGIIAGIIKFIKGLIEKFTGK

SEQ ID NO: 1092 - protein, 21 aa, Artificial
  Peptide with targeting and/or antimicrobial activity
MGIIAGIIKVIKSLIEQFTGK

SEQ ID NO: 1093 - protein, 26 aa, Artificial
  Peptide with targeting and/or antimicrobial activity
MIEIGSIAYLNGGSKKYNHILNQENR

SEQ ID NO: 1094 - protein, 13 aa, Artificial
  Peptide with targeting and/or antimicrobial activity
SKKYNHILNQENR

SEQ ID NO: 1095 - protein, 26 aa, Artificial
  Peptide with targeting and/or antimicrobial activity
MDIDVNKLLQAFVYFKSFEKLRHNNS

SEQ ID NO: 1096 - protein, 30 aa, Artificial; identical to SEQ ID NO: 336
  Peptide with targeting and/or antimicrobial activity

SEQ ID NO: 1097 - protein, 24 aa, Artificial
  Peptide with targeting and/or antimicrobial activity
WRGPNTEAGGKSANNIVQVGGAPT

SEQ ID NO: 1098 - protein, 23 aa, Artificial
  Peptide with targeting and/or antimicrobial activity
LIQKGLNQTFIVVIRLNNFIKKS

SEQ ID NO: 1099 - protein, 14 aa, Artificial
  Peptide with targeting and/or antimicrobial activity
SIDKRNLYNLKYYE

SEQ ID NO: 1100 - protein, 5 aa, Artificial
  Peptide with targeting and/or antimicrobial activity
ESIIE

SEQ ID NO: 1101 - protein, 5 aa, Artificial
  Peptide with targeting and/or antimicrobial activity
NDTNK

SEQ ID NO: 1102 - protein, 30 aa, Artificial; identical to SEQ ID NO: 344
  Peptide with targeting and/or antimicrobial activity

SEQ ID NO: 1103 - protein, 14 aa, Artificial
  Peptide with targeting and/or antimicrobial activity
FSLNFSKQKYVTVN

SEQ ID NO: 1104 - protein, 24 aa, Artificial
  Peptide with targeting and/or antimicrobial activity
MINELKNKNSGIMNNYVVTKESKL

SEQ ID NO: 1105 - protein, 30 aa, Artificial; identical to SEQ ID NO: 347
  Peptide with targeting and/or antimicrobial activity

SEQ ID NO: 1106 - protein, 6 aa, Artificial
  Peptide with targeting and/or antimicrobial activity
DLRKAK

SEQ ID NO: 1107 - protein, 17 aa, Artificial
  Peptide with targeting and/or antimicrobial activity
LLIIFRLWLELKWKNKK

SEQ ID NO: 1108 - protein, 6 aa, Artificial
  Peptide with targeting and/or antimicrobial activity
SIHFIN

SEQ ID NO: 1109 - protein, 25 aa, Artificial
  Peptide with targeting and/or antimicrobial activity
HNARKYLEFISQKIDGDKLTKEDSL

SEQ ID NO: 1110 - protein, 25 aa, Artificial
  Peptide with targeting and/or antimicrobial activity
ALDCSEQSVILWYETILDKIVGVIK

SEQ ID NO: 1111 - protein, 5 aa, Artificial
  Peptide with targeting and/or antimicrobial activity
NSTNE

SEQ ID NO: 1112 - protein, 16 aa, Artificial
  Peptide with targeting and/or antimicrobial activity
MTCHQAPTTTHQSNMA

SEQ ID NO: 1113 - protein, 30 aa, Artificial; identical to SEQ ID NO: 355
  Peptide with targeting and/or antimicrobial activity

SEQ ID NO: 1114 - protein, 21 aa, Artificial
  Peptide with targeting and/or antimicrobial activity
RIVVPAHQSNMASTPNLSITP

SEQ ID NO: 1115 - protein, 30 aa, Artificial; identical to SEQ ID NO: 356
  Peptide with targeting and/or antimicrobial activity

SEQ ID NO: 1116 - protein, 17 aa, Artificial
  Peptide with targeting and/or antimicrobial activity
EPKKKHFPKMESASSEP

SEQ ID NO: 1117 - protein, 6 aa, Artificial
  Peptide with targeting and/or antimicrobial activity
SFYESY

SEQ ID NO: 1118 - protein, 21 aa, Artificial
  Peptide with targeting and/or antimicrobial activity
ILNRLSRIVSNEVTSLIYSLK

SEQ ID NO: 1119 - protein, 30 aa, Artificial; identical to SEQ ID NO: 360
  Peptide with targeting and/or antimicrobial activity

SEQ ID NO: 1120 - protein, 30 aa, Artificial; identical to SEQ ID NO: 363
  Peptide with targeting and/or antimicrobial activity

SEQ ID NO: 1121 - protein, 10 aa, Artificial
  Peptide with targeting and/or antimicrobial activity
ELLVILPGFI

SEQ ID NO: 1122 - protein, 17 aa, Artificial
  Peptide with targeting and/or antimicrobial activity
LLLSYFRYTGALLQSLF

SEQ ID NO: 1123 - protein, 22 aa, Artificial
  Peptide with targeting and/or antimicrobial activity
MIKNETAYQMNELLVIRSAYAK

SEQ ID NO: 1124 - protein, 10 aa, Artificial
  Peptide with targeting and/or antimicrobial activity
LDINDYRSTY

SEQ ID NO: 1125 - protein, 13 aa, Artificial
  Peptide with targeting and/or antimicrobial activity
LDFYLTKHLTLML

SEQ ID NO: 1126 - protein, 20 aa, Artificial
  Peptide with targeting and/or antimicrobial activity
LYFAFKKYQERVNQAPNIEY

SEQ ID NO: 1127 - protein, 12 aa, Artificial
  Peptide with targeting and/or antimicrobial activity
AYYLKRREEKGK

SEQ ID NO: 1128 - protein, 25 aa, Artificial
  Peptide with targeting and/or antimicrobial activity
RFFNFEIKKSTKVDYVFAHVDLSDV

SEQ ID NO: 1129 - protein, 15 aa, Artificial
  Peptide with targeting and/or antimicrobial activity
QELINEAVNLLVKSK

SEQ ID NO: 1130 - protein, 38 aa, Artificial; identical to SEQ ID NO: 376
  Peptide with targeting and/or antimicrobial activity

SEQ ID NO: 1131 - protein, 40 aa, Artificial; identical to SEQ ID NO: 379
  Peptide with targeting and/or antimicrobial activity

SEQ ID NO: 1132 - protein, 22 aa, Artificial
  Peptide with targeting and/or antimicrobial activity
TMIVISIPRFEEYMKARHKKWM

SEQ ID NO: 1133 - protein, 9 aa, Artificial
  Peptide with targeting and/or antimicrobial activity
FADQSQDNA

SEQ ID NO: 1134 - protein, 26 aa, Artificial
  Peptide with targeting and/or antimicrobial activity
TITLKAGIERALHEEVPGVIEVEQVF

SEQ ID NO: 1135 - protein, 24 aa, Artificial
  Peptide with targeting and/or antimicrobial activity
GYNSYKAVQDVKTHSEEQRVTAKK

SEQ ID NO: 1136 - protein, 26 aa, Artificial
  Peptide with targeting and/or antimicrobial activity
IAAIIVLVLFQKGLLQIFNWILIQLQ

SEQ ID NO: 1137 - protein, 6 aa, Artificial
  Peptide with targeting and/or antimicrobial activity
DYYGKE

SEQ ID NO: 1138 - protein, 35 aa, Artificial; identical to SEQ ID NO: 387
  Peptide with targeting and/or antimicrobial activity

SEQ ID NO: 1139 - protein, 37 aa, Artificial; identical to SEQ ID NO: 388
  Peptide with targeting and/or antimicrobial activity

SEQ ID NO: 1140 - protein, 30 aa, Artificial; identical to SEQ ID NO: 389
  Peptide with targeting and/or antimicrobial activity

SEQ ID NO: 1141 - protein, 37 aa, Artificial; identical to SEQ ID NO: 390
  Peptide with targeting and/or antimicrobial activity

SEQ ID NO: 1142 - protein, 21 aa, Artificial
  Peptide with targeting and/or antimicrobial activity
FDPVPLKKDKSASKHSHKHNH

SEQ ID NO: 1143 - protein, 18 aa, Artificial
  Peptide with targeting and/or antimicrobial activity
SMVKSEIVDLLNGEDNDD

SEQ ID NO: 1144 - protein, 30 aa, Artificial; identical to SEQ ID NO: 393
  Peptide with targeting and/or antimicrobial activity

SEQ ID NO: 1145 - protein, 36 aa, Artificial; identical to SEQ ID NO: 394
  Peptide with targeting and/or antimicrobial activity

SEQ ID NO: 1146 - protein, 12 aa, Artificial
  Peptide with targeting and/or antimicrobial activity
RDIHPIYFMTKD

SEQ ID NO: 1147 - protein, 28 aa, Artificial
  Peptide with targeting and/or antimicrobial activity
FVNSLIMKDLSDNDMRFKYEYYNREKDT

SEQ ID NO: 1148 - protein, 27 aa, Artificial
  Peptide with targeting and/or antimicrobial activity
LYQYELLSKEEYLKCTLIINQRRNEQK

SEQ ID NO: 1149 - protein, 13 aa, Artificial
  Peptide with targeting and/or antimicrobial activity
EIIAYLEGRFANA

SEQ ID NO: 1150 - protein, 28 aa, Artificial
  Peptide with targeting and/or antimicrobial activity
TTRPQVAEDRQLDDALKETFPASDPISP

SEQ ID NO: 1151 - protein, 38 aa, Artificial; identical to SEQ ID NO: 403
  Peptide with targeting and/or antimicrobial activity

SEQ ID NO: 1152 - protein, 22 aa, Artificial
  Peptide with targeting and/or antimicrobial activity
YVVGALVILAVAGLIYSMLRKA

SEQ ID NO: 1153 - protein, 30 aa, Artificial; identical to SEQ ID NO: 406
  Peptide with targeting and/or antimicrobial activity

SEQ ID NO: 1154 - protein, 24 aa, Artificial
  Peptide with targeting and/or antimicrobial activity
GIKVVAARFEEIQFSENFDSIILA

SEQ ID NO: 1155 - protein, 17 aa, Artificial
  Peptide with targeting and/or antimicrobial activity
MKLLARDPWVCAWNDIW

SEQ ID NO: 1156 - protein, 13 aa, Artificial
  Peptide with targeting and/or antimicrobial activity
GDPTAGQKPVECP

SEQ ID NO: 1157 - protein, 24 aa, Artificial
  Peptide with targeting and/or antimicrobial activity
PPARPARIPQTPTLHGASLFRQRS

SEQ ID NO: 1158 - protein, 27 aa, Artificial
  Peptide with targeting and/or antimicrobial activity
VLGKGHDLLDVGKTALKSRVFAWLGGS

SEQ ID NO: 1159 - protein, 19 aa, Artificial
  Peptide with targeting and/or antimicrobial activity
ALSKPAIQARTLCRRQDPP

SEQ ID NO: 1160 - protein, 27 aa, Artificial
  Peptide with targeting and/or antimicrobial activity
FHRRVIRASEWALTTRSFSTPLRSAAR

SEQ ID NO: 1161 - protein, 22 aa, Artificial
  Peptide with targeting and/or antimicrobial activity
LSPRPIIVSRRSRADNNNDWSR

SEQ ID NO: 1162 - protein, 16 aa, Artificial
  Peptide with targeting and/or antimicrobial activity
RSGQPVGRPSRRAWLR

SEQ ID NO: 1163 - protein, 24 aa, Artificial
  Peptide with targeting and/or antimicrobial activity
GIVLTGRAGLVSGACSMALGVGLG

SEQ ID NO: 1164 - protein, 25 aa, Artificial
  Peptide with targeting and/or antimicrobial activity
RRGCTERLRRMARRNAWDLYAEHFY

SEQ ID NO: 1165 - protein, 20 aa, Artificial
  Peptide with targeting and/or antimicrobial activity
GKVSVLTRVPRSLGGAPANQ

SEQ ID NO: 1166 - protein, 12 aa, Artificial
  Peptide with targeting and/or antimicrobial activity
GILARADCSQIA

SEQ ID NO: 1167 - protein, 15 aa, Artificial
  Peptide with targeting and/or antimicrobial activity
LITAEQPATAPIAGK

SEQ ID NO: 1168 - protein, 22 aa, Artificial
  Peptide with targeting and/or antimicrobial activity
HTAVVWLAGVSGCVALSHCEPA

SEQ ID NO: 1169 - protein, 19 aa, Artificial
  Peptide with targeting and/or antimicrobial activity
EEVSRALAGIGLGLGCRIG

SEQ ID NO: 1170 - protein, 28 aa, Artificial
  Peptide with targeting and/or antimicrobial activity
VLPFPAIPLSRRRACVAAPRPRSRQRAS

SEQ ID NO: 1171 - protein, 9 aa, Artificial
  Peptide with targeting and/or antimicrobial activity
TQVTLCRTW

SEQ ID NO: 1172 - protein, 11 aa, Artificial
  Peptide with targeting and/or antimicrobial activity
AGRTAIVQGGG

SEQ ID NO: 1173 - protein, 19 aa, Artificial
  Peptide with targeting and/or antimicrobial activity
RRRPAGQRPEKASQAMIAA

SEQ ID NO: 1174 - protein, 19 aa, Artificial
  Peptide with targeting and/or antimicrobial activity
RLTSNQFLTRITPFVFAQH

SEQ ID NO: 1175 - protein, 17 aa, Artificial
  Peptide with targeting and/or antimicrobial activity
EVYSSPTNNVAITVQNN

SEQ ID NO: 1176 - protein, 13 aa, Artificial
  Peptide with targeting and/or antimicrobial activity
SGLGDLGFSSEAK

SEQ ID NO: 1177 - protein, 20 aa, Artificial
  Peptide with targeting and/or antimicrobial activity
DADKNLSLERDRFAWRVAAP

SEQ ID NO: 1178 - protein, 22 aa, Artificial
  Peptide with targeting and/or antimicrobial activity
ARTFAGRLGTRYFGGLMRSTKA

SEQ ID NO: 1179 - protein, 23 aa, Artificial
  Peptide with targeting and/or antimicrobial activity
HFILRKPLLFMIHSLKTGPLDRF

SEQ ID NO: 1180 - protein, 21 aa, Artificial
  Peptide with targeting and/or antimicrobial activity
QFCNFAWLFLASNNAQVSALA

SEQ ID NO: 1181 - protein, 11 aa, Artificial
  Peptide with targeting and/or antimicrobial activity
VEEDEAPPPHY

SEQ ID NO: 1182 - protein, 20 aa, Artificial
  Peptide with targeting and/or antimicrobial activity
TTARYIRRQCHTSITPLSQG

SEQ ID NO: 1183 - protein, 17 aa, Artificial
  Peptide with targeting and/or antimicrobial activity
FPAFSFGAIAGSVSVAR

SEQ ID NO: 1184 - protein, 9 aa, Artificial
  Peptide with targeting and/or antimicrobial activity
SWKCHHLAI

SEQ ID NO: 1185 - protein, 23 aa, Artificial
  Peptide with targeting and/or antimicrobial activity
ALQKQDMNLPSVKNQLVFLKSTG

SEQ ID NO: 1186 - protein, 23 aa, Artificial
  Peptide with targeting and/or antimicrobial activity
DAYHCHLVRSPDAHDLSMRIGFV

SEQ ID NO: 1187 - protein, 8 aa, Artificial
  Peptide with targeting and/or antimicrobial activity
NYAVVSHT

SEQ ID NO: 1188 - protein, 7 aa, Artificial
  Peptide with targeting and/or antimicrobial activity
NDSKASN

SEQ ID NO: 1189 - protein, 25 aa, Artificial
  Peptide with targeting and/or antimicrobial activity
ELKITNYNVNTVLYRYYKWGNDLCE

SEQ ID NO: 1190 - protein, 23 aa, Artificial
  Peptide with targeting and/or antimicrobial activity
VDPADDGTRHIRPEDGDPIEIDE

SEQ ID NO: 1191 - protein, 13 aa, Artificial
  Peptide with targeting and/or antimicrobial activity
DYFYITLSQKNTF

SEQ ID NO: 1192 - protein, 38 aa, Artificial; identical to SEQ ID NO: 501
  Peptide with targeting and/or antimicrobial activity

SEQ ID NO: 1193 - protein, 27 aa, Artificial
  Peptide with targeting and/or antimicrobial activity
DANAMARTTIAIVYILALIALTISYSL

SEQ ID NO: 1194 - protein, 8 aa, Artificial
  Peptide with targeting and/or antimicrobial activity
RTPYILRS

SEQ ID NO: 1195 - protein, 32 aa, Artificial; identical to SEQ ID NO: 509
  Peptide with targeting and/or antimicrobial activity

SEQ ID NO: 1196 - protein, 9 aa, Artificial
  Peptide with targeting and/or antimicrobial activity
INSRYKISF

SEQ ID NO: 1197 - protein, 26 aa, Artificial
  Peptide with targeting and/or antimicrobial activity
SEDIFGRLANEKANGLEELRKIRLKQ

SEQ ID NO: 1198 - protein, 24 aa, Artificial
  Peptide with targeting and/or antimicrobial activity
DHKINESQHNPFRSDSNKQNVDFF

SEQ ID NO: 1199 - protein, 38 aa, Artificial; identical to SEQ ID NO: 527
  Peptide with targeting and/or antimicrobial activity

SEQ ID NO: 1200 - protein, 40 aa, Artificial
  Peptide with targeting and/or antimicrobial activity
MQSLSNRQSLIASYILMGIFLSFGYPPASLSKFFCRLSHL

SEQ ID NO: 1201 - protein, 42 aa, Artificial; identical to SEQ ID NO: 535
  Peptide with targeting and/or antimicrobial activity

SEQ ID NO: 1202 - protein, 9 aa, Artificial
  Peptide with targeting and/or antimicrobial activity
AAQPQTTSP

SEQ ID NO: 1203 - protein, 23 aa, Artificial
  Peptide with targeting and/or antimicrobial activity
LVGALLIFVALIYMVLKGNADKN

SEQ ID NO: 1204 - protein, 40 aa, Artificial
  Peptide with targeting and/or antimicrobial activity
SIQEAEKIIKNDPFYIHDVADYDFMWFEPSKSLEEIKEFV

SEQ ID NO: 1205 - protein, 17 aa, Artificial
  Peptide with targeting and/or antimicrobial activity
LDLALSTNSLNLEGFSF

SEQ ID NO: 1206 - protein, 24 aa, Artificial
  Peptide with targeting and/or antimicrobial activity
LSLATFAKIFMTRSNWSLKRFNRL

SEQ ID NO: 1207 - protein, 30 aa, Artificial; identical to SEQ ID NO: 544
  Peptide with targeting and/or antimicrobial activity

SEQ ID NO: 1208 - protein, 30 aa, Artificial; identical to SEQ ID NO: 548
  Peptide with targeting and/or antimicrobial activity

SEQ ID NO: 1209 - protein, 15 aa, Artificial
  Peptide with targeting and/or antimicrobial activity
MVHDMTNGTLIIVKH

SEQ ID NO: 1210 - protein, 19 aa, Artificial
  Peptide with targeting and/or antimicrobial activity
SFVSTTVRLIFEESKRYKF

SEQ ID NO: 1211 - protein, 5 aa, Artificial
  Peptide with targeting and/or antimicrobial activity
YDPLK

SEQ ID NO: 1212 - protein, 21 aa, Artificial
  Peptide with targeting and/or antimicrobial activity
DFLVNFLWFKGELNWGKKRYK

SEQ ID NO: 1213 - protein, 32 aa, Artificial
  Peptide with targeting and/or antimicrobial activity
GAFGMPSIKTNTICGEKGKFISACDAWLSNLK

SEQ ID NO: 1214 - protein, 28 aa, Artificial
  Peptide with targeting and/or antimicrobial activity
ISKGIDDIVYVINKILSIGNIFKIIKRK

SEQ ID NO: 1215 - protein, 18 aa, Artificial
  Peptide with targeting and/or antimicrobial activity
GIVLIGLKLIPLLANVLN

SEQ ID NO: 1216 - protein, 19 aa, Artificial
  Peptide with targeting and/or antimicrobial activity
EYPWSWISEPWPWDKSFYK

SEQ ID NO: 1217 - protein, 36 aa, Artificial; identical to SEQ ID NO: 558
  Peptide with targeting and/or antimicrobial activity

SEQ ID NO: 1218 - protein, 28 aa, Artificial
  Peptide with targeting and/or antimicrobial activity
GCILPHKKDNYNYIMSKFQDLVKITSKK

SEQ ID NO: 1219 - protein, 37 aa, Artificial; identical to SEQ ID NO: 560
  Peptide with targeting and/or antimicrobial activity

SEQ ID NO: 1220 - protein, 18 aa, Artificial
  Peptide with targeting and/or antimicrobial activity
GVALIGTILVPLLSGLFG

SEQ ID NO: 1221 - protein, 32 aa, Artificial; identical to SEQ ID NO: 564
  Peptide with targeting and/or antimicrobial activity

SEQ ID NO: 1222 - protein, 35 aa, Artificial
  Peptide with targeting and/or antimicrobial activity
MGRHLWNPSYFVATVSENTEEQIRKYINNQKKQVK

SEQ ID NO: 1223 - protein, 41 aa, Artificial; identical to SEQ ID NO: 567
  Peptide with targeting and/or antimicrobial activity

SEQ ID NO: 1224 - protein, 18 aa, Artificial
  Peptide with targeting and/or antimicrobial activity
GIVLIGLKLIPLLANVLR

SEQ ID NO: 1225 - protein, 22 aa, Artificial
  Peptide with targeting and/or antimicrobial activity
AAYPIEDWSDWYEDFFIMLSNI

SEQ ID NO: 1226 - protein, 15 aa, Artificial
  Peptide with targeting and/or antimicrobial activity
KKIDILINKYMYLSK

SEQ ID NO: 1227 - protein, 16 aa, Artificial
  Peptide with targeting and/or antimicrobial activity
AFSGVYKTLIVYTRRK

SEQ ID NO: 1228 - protein, 22 aa, Artificial
  Peptide with targeting and/or antimicrobial activity
DERLPEAKAIRNFNGSVMVLGR

SEQ ID NO: 1229 - protein, 15 aa, Artificial
  Peptide with targeting and/or antimicrobial activity
GIFTGVTVVVSLKHC

SEQ ID NO: 1230 - protein, 30 aa, Artificial; identical to SEQ ID NO: 584
  Peptide with targeting and/or antimicrobial activity

SEQ ID NO: 1231 - protein, 10 aa, Artificial
  Peptide with targeting and/or antimicrobial activity
LAVILRAIVY

SEQ ID NO: 1232 - protein, 19 aa, Artificial
  Peptide with targeting and/or antimicrobial activity
FTFSKCRASNGRGFGTLWL

SEQ ID NO: 1233 - protein, 15 aa, Artificial
  Peptide with targeting and/or antimicrobial activity
WIAIGLLLYFSLKNQ

SEQ ID NO: 1234 - protein, 21 aa, Artificial
  Peptide with targeting and/or antimicrobial activity
VSIKIGAIVIGMIGLMELLTE

SEQ ID NO: 1235 - protein, 30 aa, Artificial; identical to SEQ ID NO: 592
  Peptide with targeting and/or antimicrobial activity

SEQ ID NO: 1236 - protein, 30 aa, Artificial; identical to SEQ ID NO: 595
  Peptide with targeting and/or antimicrobial activity

SEQ ID NO: 1237 - protein, 17 aa, Artificial
  Peptide with targeting and/or antimicrobial activity
NIERILKEKVWMIRCVE

SEQ ID NO: 1238 - protein, 25 aa, Artificial
  Peptide with targeting and/or antimicrobial activity
SMLSVTVMCLMHASVAANQAMEKKV

SEQ ID NO: 1239 - protein, 19 aa, Artificial
  Peptide with targeting and/or antimicrobial activity
ALCSVIKAIELGIINVHLQ

SEQ ID NO: 1240 - protein, 30 aa, Artificial; identical to SEQ ID NO: 604
  Peptide with targeting and/or antimicrobial activity

SEQ ID NO: 1241 - protein, 16 aa, Artificial
  Peptide with targeting and/or antimicrobial activity
VIFLHKESGNLKEIFY

SEQ ID NO: 1242 - protein, 8 aa, Artificial
  Peptide with targeting and/or antimicrobial activity
HFYLLFER

SEQ ID NO: 1243 - protein, 20 aa, Artificial
  Peptide with targeting and/or antimicrobial activity
HLFFVKGMFILCQKNQINDE

SEQ ID NO: 1244 - protein, 30 aa, Artificial; identical to SEQ ID NO: 610
  Peptide with targeting and/or antimicrobial activity

SEQ ID NO: 1245 - protein, 27 aa, Artificial
  Peptide with targeting and/or antimicrobial activity
MTVFEALMLAIAFATLIVKISNKNDKK

SEQ ID NO: 1246 - protein, 21 aa, Artificial
  Peptide with targeting and/or antimicrobial activity
ESAKSNLNFLMQEEWALFLLL

SEQ ID NO: 1247 - protein, 23 aa, Artificial
  Peptide with targeting and/or antimicrobial activity
VFVVLFIIYLASKLLTKLFPIKK

SEQ ID NO: 1248 - protein, 16 aa, Artificial
  Peptide with targeting and/or antimicrobial activity
KKIIPLITLFVVTLVG

SEQ ID NO: 1249 - protein, 24 aa, Artificial
  Peptide with targeting and/or antimicrobial activity
QGANPCQQVGFTVNDPDCRLAKTV

SEQ ID NO: 1250 - protein, 21 aa, Artificial
  Peptide with targeting and/or antimicrobial activity
KYKCSWCKRVYTLRKDHKTAR

SEQ ID NO: 1251 - protein, 12 aa, Artificial
  Peptide with targeting and/or antimicrobial activity
WSEIEINTKQSN

SEQ ID NO: 1252 - protein, 25 aa, Artificial
  Peptide with targeting and/or antimicrobial activity
MIKKSILKIKYYVPVLISLTLILSA

SEQ ID NO: 1253 - protein, 20 aa, Artificial
  Peptide with targeting and/or antimicrobial activity
FTLTLITTIVAILNYKDKKK

SEQ ID NO: 1254 - protein, 29 aa, Artificial
  Peptide with targeting and/or antimicrobial activity
GAVGIAFFAGNMKQDKRIADRQNKKSEKK

SEQ ID NO: 1255 - protein, 36 aa, Artificial; identical to SEQ ID NO: 623
  Peptide with targeting and/or antimicrobial activity

SEQ ID NO: 1256 - protein, 14 aa, Artificial
  Peptide with targeting and/or antimicrobial activity
VVAYVITQVGAIRF

SEQ ID NO: 1257 - protein, 14 aa, Artificial
  Peptide with targeting and/or antimicrobial activity
DPAGCNDIVRKYCK

SEQ ID NO: 1258 - protein, 14 aa, Artificial
  Peptide with targeting and/or antimicrobial activity
DLVQSILSEFKKSG

SEQ ID NO: 1259 - protein, 10 aa, Artificial
  Peptide with targeting and/or antimicrobial activity
VLKEECYQKN

SEQ ID NO: 1260 - protein, 16 aa, Artificial
  Peptide with targeting and/or antimicrobial activity
YCVPLGNMGNMNNKIW

SEQ ID NO: 1261 - protein, 28 aa, Artificial
  Peptide with targeting and/or antimicrobial activity
LIYTILASLGVLTVLQAILGREPKAVKA

SEQ ID NO: 1262 - protein, 10 aa, Artificial
  Peptide with targeting and/or antimicrobial activity
VEDLMEDLNA

SEQ ID NO: 1263 - protein, 25 aa, Artificial
  Peptide with targeting and/or antimicrobial activity
ILVVLAGILLVVLSYVGISKFKMNC

SEQ ID NO: 1264 - protein, 25 aa, Artificial
  Peptide with targeting and/or antimicrobial activity
FPIISALLGAIICIAIYSFIVNRKA

SEQ ID NO: 1265 - protein, 25 aa, Artificial
  Peptide with targeting and/or antimicrobial activity
YWLSRVTTGHSFAFEKPVPLSLTIK

SEQ ID NO: 1266 - protein, 25 aa, Artificial
  Peptide with targeting and/or antimicrobial activity
LLSTEQLLKYYDGETFDGFQLPSNE

SEQ ID NO: 1267 - protein, 9 aa, Artificial
  Peptide with targeting and/or antimicrobial activity
VLYFQATVV

SEQ ID NO: 1268 - protein, 18 aa, Artificial
  Peptide with targeting and/or antimicrobial activity
LVRIEVDDLEEWYERNFI

SEQ ID NO: 1269 - protein, 27 aa, Artificial
  Peptide with targeting and/or antimicrobial activity
YLEMNADYLSNMDIFDELWEKYLENNK

SEQ ID NO: 1270 - protein, 20 aa, Artificial
  Peptide with targeting and/or antimicrobial activity
KPKNKKEKTVISYEKLLSMY

SEQ ID NO: 1271 - protein, 16 aa, Artificial
  Peptide with targeting and/or antimicrobial activity
YCVPLGNMGNMNNKIW

SEQ ID NO: 1272 - protein, 18 aa, Artificial
  Peptide with targeting and/or antimicrobial activity
FALELIALCRNLFIVYFP

SEQ ID NO: 1273 - protein, 17 aa, Artificial
  Peptide with targeting and/or antimicrobial activity
WVAVAILLNIALQTQLT

SEQ ID NO: 1274 - protein, 22 aa, Artificial
  Peptide with targeting and/or antimicrobial activity
TFAGSIKIGVPDLVHVTFNCKR

SEQ ID NO: 1275 - protein, 7 aa, Artificial
  Peptide with targeting and/or antimicrobial activity
LLNKKLE

SEQ ID NO: 1276 - protein, 30 aa, Artificial
  Peptide with targeting and/or antimicrobial activity
MIDVTIGQKSKTGAFNASYSICFSGENFSF

SEQ ID NO: 1277 - protein, 16 aa, Artificial
  Peptide with targeting and/or antimicrobial activity
SKAGLYGKIERSDKRE

SEQ ID NO: 1278 - protein, 6 aa, Artificial
  Peptide with targeting and/or antimicrobial activity
DSYFRS

SEQ ID NO: 1279 - protein, 22 aa, Artificial
  Peptide with targeting and/or antimicrobial activity
FFLVHFYIRKRKGKVSIFLNYF

SEQ ID NO: 1280 - protein, 13 aa, Artificial
  Peptide with targeting and/or antimicrobial activity
VVTGKVGSLPQIK

SEQ ID NO: 1281 - protein, 13 aa, Artificial
  Peptide with targeting and/or antimicrobial activity
KHCFEITDKTDVV

SEQ ID NO: 1282 - protein, 30 aa, Artificial; identical to SEQ ID NO: 652
  Peptide with targeting and/or antimicrobial activity

SEQ ID NO: 1283 - protein, 21 aa, Artificial
  Peptide with targeting and/or antimicrobial activity
AGKKERLLSFREQFLNKNKKK

SEQ ID NO: 1284 - protein, 17 aa, Artificial
  Peptide with targeting and/or antimicrobial activity
IAAFVTSRAFSDTVSPI

SEQ ID NO: 1285 - protein, 30 aa, Artificial; identical to SEQ ID NO: 655
  Peptide with targeting and/or antimicrobial activity

SEQ ID NO: 1286 - protein, 30 aa, Artificial; identical to SEQ ID NO: 656
  Peptide with targeting and/or antimicrobial activity

SEQ ID NO: 1287 - protein, 20 aa, Artificial
  Peptide with targeting and/or antimicrobial activity
YVLEYHGLRATQDVDAFMAL

SEQ ID NO: 1288 - protein, 7 aa, Artificial
  Peptide with targeting and/or antimicrobial activity
ENEESIF

SEQ ID NO: 1289 - protein, 15 aa, Artificial
  Peptide with targeting and/or antimicrobial activity
AATLICVGSGIMSSL

SEQ ID NO: 1290 - protein, 13 aa, Artificial
  Peptide with targeting and/or antimicrobial activity
AVVCGYLAYTATS

SEQ ID NO: 1291 - protein, 9 aa, Artificial
  Peptide with targeting and/or antimicrobial activity
VAYAAICWW

SEQ ID NO: 1292 - protein, 13 aa, Artificial
  Peptide with targeting and/or antimicrobial activity
FNGDSEFFLCIAF

SEQ ID NO: 1293 - protein, 27 aa, Artificial
  Peptide with targeting and/or antimicrobial activity
MRKEFHNVLSSGQLLADKRPARDYNRK

SEQ ID NO: 1294 - protein, 16 aa, Artificial
  Peptide with targeting and/or antimicrobial activity
GQLLADKRPARDYNRK

SEQ ID NO: 1295 - protein, 23 aa, Artificial
  Peptide with targeting and/or antimicrobial activity
FQKPFTGEEVEDFQDDDEIPTII

SEQ ID NO: 1296 - protein, 25 aa, Artificial
  Peptide with targeting and/or antimicrobial activity
RVLVLKKFHGIMDGNRNVAVFFVGQ

SEQ ID NO: 1297 - protein, 30 aa, Artificial; identical to SEQ ID NO: 669
  Peptide with targeting and/or antimicrobial activity

SEQ ID NO: 1298 - protein, 30 aa, Artificial; identical to SEQ ID NO: 671
  Peptide with targeting and/or antimicrobial activity

SEQ ID NO: 1299 - protein, 21 aa, Artificial
  Peptide with targeting and/or antimicrobial activity
KLLYFFNYFENLQQVHLLVQL

SEQ ID NO: 1300 - protein, 30 aa, Artificial; identical to SEQ ID NO: 673
  Peptide with targeting and/or antimicrobial activity

SEQ ID NO: 1301 - protein, 14 aa, Artificial
  Peptide with targeting and/or antimicrobial activity
ASMTKRLKLAMSKV

SEQ ID NO: 1302 - protein, 6 aa, Artificial
  Peptide with targeting and/or antimicrobial activity
SGNEKV

SEQ ID NO: 1303 - protein, 22 aa, Artificial
  Peptide with targeting and/or antimicrobial activity
IDKSRNKDQFSHIFGLYNICSG

SEQ ID NO: 1304 - protein, 15 aa, Artificial
  Peptide with targeting and/or antimicrobial activity
SLQSQLGPCLHDQRH

SEQ ID NO: 1305 - protein, 21 aa, Artificial
  Peptide with targeting and/or antimicrobial activity
MPTTKSKQKGWTNTKKASNTQ

SEQ ID NO: 1306 - protein, 13 aa, Artificial
  Peptide with targeting and/or antimicrobial activity
HRNLIILQRTIFI

SEQ ID NO: 1307 - protein, 30 aa, Artificial; identical to SEQ ID NO: 679
  Peptide with targeting and/or antimicrobial activity

SEQ ID NO: 1308 - protein, 30 aa, Artificial; identical to SEQ ID NO: 328
  Peptide with targeting and/or antimicrobial activity

SEQ ID NO: 1309 - protein, 11 aa, Artificial
  Peptide with targeting and/or antimicrobial activity
IIQDIAHAFGY

SEQ ID NO: 1310 - protein, 30 aa, Artificial; identical to SEQ ID NO: 682
  Peptide with targeting and/or antimicrobial activity

SEQ ID NO: 1311 - protein, 30 aa, Artificial
  Peptide with targeting and/or antimicrobial activity
MARNDDDIKKIKGTLGQSPEVYGERKLPYT

SEQ ID NO: 1312 - protein, 9 aa, Artificial
  Peptide with targeting and/or antimicrobial activity
TCVKPRTIN

SEQ ID NO: 1313 - protein, 8 aa, Artificial
  Peptide with targeting and/or antimicrobial activity
INKYHHIA

SEQ ID NO: 1314 - protein, 25 aa, Artificial
  Peptide with targeting and/or antimicrobial activity
ISLIIFIMLFVVALFKCITNYKHQS

SEQ ID NO: 1315 - protein, 16 aa, Artificial
  Peptide with targeting and/or antimicrobial activity
EKRMSFNENQSHRPLL

SEQ ID NO: 1316 - protein, 30 aa, Artificial; identical to SEQ ID NO: 687
  Peptide with targeting and/or antimicrobial activity

SEQ ID NO: 1317 - protein, 30 aa, Artificial; identical to SEQ ID NO: 688
  Peptide with targeting and/or antimicrobial activity

SEQ ID NO: 1318 - protein, 7 aa, Artificial
  Peptide with targeting and/or antimicrobial activity
KNKTDTL

SEQ ID NO: 1319 - protein, 10 aa, Artificial
  Peptide with targeting and/or antimicrobial activity
VDMVNRFLGN

SEQ ID NO: 1320 - protein, 25 aa, Artificial
  Peptide with targeting and/or antimicrobial activity
KPVGKALEEIADGKIEPVVPKEYLG

SEQ ID NO: 1321 - protein, 6 aa, Artificial
  Peptide with targeting and/or antimicrobial activity
VRKSDQ

SEQ ID NO: 1322 - protein, 9 aa, Artificial
  Peptide with targeting and/or antimicrobial activity
YYKDYFKEI

SEQ ID NO: 1323 - protein, 12 aa, Artificial
  Peptide with targeting and/or antimicrobial activity
EDNKDKKDKKDK

SEQ ID NO: 1324 - protein, 17 aa, Artificial
  Peptide with targeting and/or antimicrobial activity
YKVNYNNIDNHFNTLRH

SEQ ID NO: 1325 - protein, 18 aa, Artificial
  Peptide with targeting and/or antimicrobial activity
PYSDSYATRPHWEQHRAR

SEQ ID NO: 1326 - protein, 30 aa, Artificial; identical to SEQ ID NO: 697
  Peptide with targeting and/or antimicrobial activity

SEQ ID NO: 1327 - protein, 30 aa, Artificial; identical to SEQ ID NO: 698
  Peptide with targeting and/or antimicrobial activity

SEQ ID NO: 1328 - protein, 25 aa, Artificial
  Peptide with targeting and/or antimicrobial activity
MAADIISTIGDLVKWIIDTVNKFKK

SEQ ID NO: 1329 - protein, 30 aa, Artificial; identical to SEQ ID NO: 700
  Peptide with targeting and/or antimicrobial activity

SEQ ID NO: 1330 - protein, 30 aa, Artificial; identical to SEQ ID NO: 701
  Peptide with targeting and/or antimicrobial activity

SEQ ID NO: 1331 - protein, 14 aa, Artificial
  Peptide with targeting and/or antimicrobial activity
WADAQYKLCENCSE

SEQ ID NO: 1332 - protein, 12 aa, Artificial
  Peptide with targeting and/or antimicrobial activity
HKNKLNIPHIKS

SEQ ID NO: 1333 - protein, 20 aa, Artificial
  Peptide with targeting and/or antimicrobial activity
HLFILKSHLKPFPPFRYTYD

SEQ ID NO: 1334 - protein, 12 aa, Artificial
  Peptide with targeting and/or antimicrobial activity
AYILKRREEKNK

SEQ ID NO: 1335 - protein, 30 aa, Artificial; identical to SEQ ID NO: 706
  Peptide with targeting and/or antimicrobial activity

SEQ ID NO: 1336 - protein, 17 aa, Artificial
  Peptide with targeting and/or antimicrobial activity
LVGYVRTSGTVRSYKIN

SEQ ID NO: 1337 - protein, 12 aa, Artificial
  Peptide with targeting and/or antimicrobial activity
HKKDIRKQVFKN

SEQ ID NO: 1338 - protein, 12 aa, Artificial
  Peptide with targeting and/or antimicrobial activity
KNSMSRSIALID

SEQ ID NO: 1339 - protein, 21 aa, Artificial
  Peptide with targeting and/or antimicrobial activity
VMQSLYVKPPLILVTKLAQQN

SEQ ID NO: 1340 - protein, 16 aa, Artificial
  Peptide with targeting and/or antimicrobial activity
SFMPEIQKNTIPTQMK

SEQ ID NO: 1341 - protein, 16 aa, Artificial
  Peptide with targeting and/or antimicrobial activity
SNGVGLGVGIGSGIRF

SEQ ID NO: 1342 - protein, 24 aa, Artificial
  Peptide with targeting and/or antimicrobial activity
QRFYKLFYHIDLTNEQALKLFQVK

SEQ ID NO: 1343 - protein, 21 aa, Artificial
  Peptide with targeting and/or antimicrobial activity
DKSTQDKDIKQAKLLAQELGL

SEQ ID NO: 1344 - protein, 16 aa, Artificial
  Peptide with targeting and/or antimicrobial activity
ASKQASKQASKQASKQ

SEQ ID NO: 1345 - protein, 14 aa, Artificial
  Peptide with targeting and/or antimicrobial activity
VKPTMTASLISTVC

SEQ ID NO: 1346 - protein, 21 aa, Artificial
  Peptide with targeting and/or antimicrobial activity
SFYSKYSRYIDNLAGAIFLFF

SEQ ID NO: 1347 - protein, 14 aa, Artificial
  Peptide with targeting and/or antimicrobial activity
YLVYSGVLATAAAF

SEQ ID NO: 1348 - protein, 39 aa, Artificial; identical to SEQ ID NO: 744
  Peptide with targeting and/or antimicrobial activity

SEQ ID NO: 1349 - protein, 15 aa, Artificial
  Peptide with targeting and/or antimicrobial activity
CGKLLEQKNFFLKTR

SEQ ID NO: 1350 - protein, 20 aa, Artificial
  Peptide with targeting and/or antimicrobial activity
FELVDWLETNLGKILKSKSA

SEQ ID NO: 1351 - protein, 24 aa, Artificial
  Peptide with targeting and/or antimicrobial activity
PDAPRTCYHKPILAALSRIVVTDR

SEQ ID NO: 1352 - protein, 20 aa, Artificial
  Peptide with targeting and/or antimicrobial activity
KFSDQIDKGQDALKDKLGDL

SEQ ID NO: 1353 - protein, 15 aa, Artificial
  Peptide with targeting and/or antimicrobial activity
VLLLFIFQPFQKQLL

SEQ ID NO: 1354 - protein, 32 aa, Artificial; identical to SEQ ID NO: 750
  Peptide with targeting and/or antimicrobial activity

SEQ ID NO: 1355 - protein, 17 aa, Artificial
  Peptide with targeting and/or antimicrobial activity
LVDVVVLIRRHLPKSCS

SEQ ID NO: 1356 - protein, 13 aa, Artificial
  Peptide with targeting and/or antimicrobial activity
LSEMERRRLRKRA

SEQ ID NO: 1357 - protein, 26 aa, Artificial
  Peptide with targeting and/or antimicrobial activity
SKFKVLRKIIIKEYKGELMLSIQKQR

SEQ ID NO: 1358 - protein, 21 aa, Artificial
  Peptide with targeting and/or antimicrobial activity
YIQFHLNQQPRPKVKKIKIFL

SEQ ID NO: 1359 - protein, 26 aa, Artificial
  Peptide with targeting and/or antimicrobial activity
KFIYKYKLSFIIYKILIQTLTMELNK

SEQ ID NO: 1360 - protein, 18 aa, Artificial
  Peptide with targeting and/or antimicrobial activity
KTPNDKIHKTIIIKHIIL

SEQ ID NO: 1361 - protein, 26 aa, Artificial
  Peptide with targeting and/or antimicrobial activity
KYFHLFYHNIIHYSKQHLSLKVDFKN

SEQ ID NO: 1362 - protein, 19 aa, Artificial
  Peptide with targeting and/or antimicrobial activity
NIKTRKRALKIIKQHQRSK

SEQ ID NO: 1363 - protein, 21 aa, Artificial
  Peptide with targeting and/or antimicrobial activity
MEPIPHIMIIANQIGIIIEKA

SEQ ID NO: 1364 - protein, 13 aa, Artificial
  Peptide with targeting and/or antimicrobial activity
LANDYYKKTKKSW

SEQ ID NO: 1365 - protein, 30 aa, Artificial; identical to SEQ ID NO: 1059
  Peptide with targeting and/or antimicrobial activity

SEQ ID NO: 1366 - protein, 27 aa, Artificial
  Peptide with targeting and/or antimicrobial activity
SIILTKKKRRKIPLSIDSQIYKYTFKQ

SEQ ID NO: 1367 - protein, 19 aa, Artificial
  Peptide with targeting and/or antimicrobial activity
KSILILIKVIFIGQTTIIL

SEQ ID NO: 1368 - protein, 26 aa, Artificial
  Peptide with targeting and/or antimicrobial activity
RRNLNSPNIKTRKRALKIIKQHQRSK

SEQ ID NO: 1369 - protein, 23 aa, Artificial
  Peptide with targeting and/or antimicrobial activity
KKDNPSLNDQDKNAVLNLLALAK

SEQ ID NO: 1370 - protein, 26 aa, Artificial
  Peptide with targeting and/or antimicrobial activity
NILFGIIGFVVAMTAAVIVTAISIAK

SEQ ID NO: 1371 - protein, 17 aa, Artificial
  Peptide with targeting and/or antimicrobial activity
FGEKQMRSWWKVHWFHP

SEQ ID NO: 1372 - protein, 16 aa, Artificial
  Peptide with targeting and/or antimicrobial activity
RESKLIAMADMIRRRI

SEQ ID NO: 1373 - protein, 12 aa, Artificial
  Peptide with targeting and/or antimicrobial activity
PIIAPTIKTQIQ

SEQ ID NO: 1374 - protein, 18 aa, Artificial
  Peptide with targeting and/or antimicrobial activity
WSRVPGHSDTGWKVWHRW

SEQ ID NO: 1375 - protein, 26 aa, Artificial
  Peptide with targeting and/or antimicrobial activity
ARPIADLIHFNSTTVTASGDVYYGPG

SEQ ID NO: 1376 - protein, 16 aa, Artificial
  Peptide with targeting and/or antimicrobial activity
TGIGPIARPIEHGLDS

SEQ ID NO: 1377 - protein, 25 aa, Artificial
  Peptide with targeting and/or antimicrobial activity
STENGWQEFESYADVGVDPRRYVPL

SEQ ID NO: 1378 - protein, 27 aa, Artificial
  Peptide with targeting and/or antimicrobial activity
QVKEKRREIELQFRDAEKKLEASVQAE

SEQ ID NO: 1379 - protein, 24 aa, Artificial
  Peptide with targeting and/or antimicrobial activity
ELDKADAALGPAKNLAPLDVINRS

SEQ ID NO: 1380 - protein, 26 aa, Artificial
  Peptide with targeting and/or antimicrobial activity
LTIVGNALQQKNQKLLLNQKKITSLG

SEQ ID NO: 1381 - protein, 25 aa, Artificial
  Peptide with targeting and/or antimicrobial activity
AKNFLTRTAEEIGEQAVREGNINGP

SEQ ID NO: 1382 - protein, 28 aa, Artificial
  Peptide with targeting and/or antimicrobial activity
EAYMRFLDREMEGLTAAYNVKLFTEAIS

SEQ ID NO: 1383 - protein, 19 aa, Artificial
  Peptide with targeting and/or antimicrobial activity
SLQIRMNTLTAAKASIEAA

SEQ ID NO: 1384 - protein, 22 aa, Artificial
  Peptide with targeting and/or antimicrobial activity
AANKAREQAAAEAKRKAEEQAR

SEQ ID NO: 1385 - protein, 12 aa, Artificial
  Peptide with targeting and/or antimicrobial activity
ADAPPPLIVRYS

SEQ ID NO: 1386 - protein, 25 aa, Artificial
  Peptide with targeting and/or antimicrobial activity
SRPGKPGGVSIDVSRDRQDILSNYP

SEQ ID NO: 1387 - protein, 20 aa, Artificial
  Peptide with targeting and/or antimicrobial activity
FGNPFRGFTLAMEADFKKRK

SEQ ID NO: 1388 - protein, 25 aa, Artificial
  Peptide with targeting and/or antimicrobial activity
ESLEADVQAELDTEAAKYPALPASF

SEQ ID NO: 1389 - protein, 20 aa, Artificial
  Peptide with targeting and/or antimicrobial activity
TPEQWLERSTVVVTGLLNRK

SEQ ID NO: 1390 - protein, 25 aa, Artificial
  Peptide with targeting and/or antimicrobial activity
RPELDNELDVVQNSASLDKLQASYN

SEQ ID NO: 1391 - protein, 25 aa, Artificial
  Peptide with targeting and/or antimicrobial activity
TIILNDQINSLQERLNKLNAETDRR

SEQ ID NO: 1392 - protein, 24 aa, Artificial
  Peptide with targeting and/or antimicrobial activity
RAEAEAQRQAEADAKRKAEEAARL

SEQ ID NO: 1393 - protein, 24 aa, Artificial
  Peptide with targeting and/or antimicrobial activity
EAQQVTQQLGADFNAITTPTATKV

SEQ ID NO: 1394 - protein, 25 aa, Artificial
  Peptide with targeting and/or antimicrobial activity
QQRVKAVDASLSQVSTQVSGAVASA

SEQ ID NO: 1395 - protein, 24 aa, Artificial
  Peptide with targeting and/or antimicrobial activity
KSKISEYTEKEFLEFVEDIYTNNK

SEQ ID NO: 1396 - protein, 24 aa, Artificial
  Peptide with targeting and/or antimicrobial activity
SDLLYYPNENREDSPAGVVKEVKE

SEQ ID NO: 1397 - protein, 13 aa, Artificial
  Peptide with targeting and/or antimicrobial activity
WRASKGLPGFKAG

SEQ ID NO: 1398 - protein, 23 aa, Artificial
  Peptide with targeting and/or antimicrobial activity
EKKLIVKLIDSIGKSHEEIVGAG

SEQ ID NO: 1399 - protein, 26 aa, Artificial
  Peptide with targeting and/or antimicrobial activity
LVKSGKLESPYEHSEHLTLSQEKGLE

SEQ ID NO: 1400 - protein, 25 aa, Artificial
  Peptide with targeting and/or antimicrobial activity
LNFRAENKILEKIHISLIDTVEGSA

SEQ ID NO: 1401 - protein, 25 aa, Artificial
  Peptide with targeting and/or antimicrobial activity
AYSGELPEPLVRKMSKEQVRSVMGK

SEQ ID NO: 1402 - protein, 25 aa, Artificial
  Peptide with targeting and/or antimicrobial activity
PFETRESFRVPVIGILGGWDYFMHP

SEQ ID NO: 1403 - protein, 28 aa, Artificial
  Peptide with targeting and/or antimicrobial activity
QKANLRIGFTYTSDSNVCNLTFALLGSK

SEQ ID NO: 1404 - protein, 33 aa, Artificial; identical to SEQ ID NO: 790
  Peptide with targeting and/or antimicrobial activity

SEQ ID NO: 1405 - protein, 7 aa, Artificial
  Peptide with targeting and/or antimicrobial activity
WTARARR

SEQ ID NO: 1406 - protein, 22 aa, Artificial
  Peptide with targeting and/or antimicrobial activity
NLKTIEKECPFCNNKMDIKLKD

SEQ ID NO: 1407 - protein, 28 aa, Artificial
  Peptide with targeting and/or antimicrobial activity
KFQGEFTNIGQSYIVSASHMSTSLNTGK

SEQ ID NO: 1408 - protein, 15 aa, Artificial
  Peptide with targeting and/or antimicrobial activity
SYIKNLSNQKFLIAF

SEQ ID NO: 1409 - protein, 16 aa, Artificial
  Peptide with targeting and/or antimicrobial activity
DYNHLLNVVQDWVNTN

SEQ ID NO: 1410 - protein, 12 aa, Artificial
  Peptide with targeting and/or antimicrobial activity
FFNQANYFFKEF

SEQ ID NO: 1411 - protein, 35 aa, Artificial; identical to SEQ ID NO: 796
  Peptide with targeting and/or antimicrobial activity

SEQ ID NO: 1412 - protein, 12 aa, Artificial
  Peptide with targeting and/or antimicrobial activity
ESVEAIKAKAIK

SEQ ID NO: 1413 - protein, 36 aa, Artificial; identical to SEQ ID NO: 798
  Peptide with targeting and/or antimicrobial activity

SEQ ID NO: 1414 - protein, 10 aa, Artificial
  Peptide with targeting and/or antimicrobial activity
YYQAKLFPLL

SEQ ID NO: 1415 - protein, 27 aa, Artificial
  Peptide with targeting and/or antimicrobial activity
DLLKSLLGQDGAKNDEIIEFIKIIMEK

SEQ ID NO: 1416 - protein, 18 aa, Artificial
  Peptide with targeting and/or antimicrobial activity
IMKNYKYFKLFIVKYALF

SEQ ID NO: 1417 - protein, 26 aa, Artificial
  Peptide with targeting and/or antimicrobial activity
MEISTLKKEKLHVKDELSQYLANYKK

SEQ ID NO: 1418 - protein, 6 aa, Artificial
  Peptide with targeting and/or antimicrobial activity
IVSAIV

SEQ ID NO: 1419 - protein, 19 aa, Artificial
  Peptide with targeting and/or antimicrobial activity
LQNKIYELLYIKERSKLCS

SEQ ID NO: 1420 - protein, 24 aa, Artificial
  Peptide with targeting and/or antimicrobial activity
SKMWDKILTILILILELIRELIKL

SEQ ID NO: 1421 - protein, 19 aa, Artificial
  Peptide with targeting and/or antimicrobial activity
DEIKVSDEEIEKFIKENNL

SEQ ID NO: 1422 - protein, 23 aa, Artificial
  Peptide with targeting and/or antimicrobial activity
MKFMLEVRNKAISAYKEITRTQI

SEQ ID NO: 1423 - protein, 9 aa, Artificial
  Peptide with targeting and/or antimicrobial activity
LFEIFKPKH

SEQ ID NO: 1424 - protein, 41 aa, Artificial; identical to SEQ ID NO: 808
  Peptide with targeting and/or antimicrobial activity

SEQ ID NO: 1425 - protein, 9 aa, Artificial
  Peptide with targeting and/or antimicrobial activity
YRVTVKALE

SEQ ID NO: 1426 - protein, 16 aa, Artificial
  Peptide with targeting and/or antimicrobial activity
LEKEKKEYIEKLFKTK

SEQ ID NO: 1427 - protein, 30 aa, Artificial; identical to SEQ ID NO: 811
  Peptide with targeting and/or antimicrobial activity

SEQ ID NO: 1428 - protein, 7 aa, Artificial
  Peptide with targeting and/or antimicrobial activity
LMEQVEV

SEQ ID NO: 1429 - protein, 11 aa, Artificial
  Peptide with targeting and/or antimicrobial activity
HYRWNTQWWKY

SEQ ID NO: 1430 - protein, 39 aa, Artificial; identical to SEQ ID NO: 1051
  Peptide with targeting and/or antimicrobial activity

SEQ ID NO: 1431 - protein, 19 aa, Artificial
  Peptide with targeting and/or antimicrobial activity
YIESDPRKFDYIFGAIRDH

SEQ ID NO: 1432 - protein, 23 aa, Artificial
  Peptide with targeting and/or antimicrobial activity
TEIKLDNNEYLVLNLDDILGILK

SEQ ID NO: 1433 - protein, 19 aa, Artificial
  Peptide with targeting and/or antimicrobial activity
VFLKLKTSKIDLASIIFYP

SEQ ID NO: 1434 - protein, 35 aa, Artificial; identical to SEQ ID NO: 817
  Peptide with targeting and/or antimicrobial activity

SEQ ID NO: 1435 - protein, 7 aa, Artificial
  Peptide with targeting and/or antimicrobial activity
ADEFAKL

SEQ ID NO: 1436 - protein, 6 aa, Artificial
  Peptide with targeting and/or antimicrobial activity
GLDIYA

SEQ ID NO: 1437 - protein, 25 aa, Artificial
  Peptide with targeting and/or antimicrobial activity
FLNRFIFYIFTVKTKSALIKNLFLD

SEQ ID NO: 1438 - protein, 10 aa, Artificial
  Peptide with targeting and/or antimicrobial activity
IVFVVTKEKK

SEQ ID NO: 1439 - protein, 8 aa, Artificial
  Peptide with targeting and/or antimicrobial activity
PMNAAEPE

SEQ ID NO: 1440 - protein, 29 aa, Artificial
  Peptide with targeting and/or antimicrobial activity
KLNTLNKKDNPSLNDQDKNAVLNLLALAK

SEQ ID NO: 1441 - protein, 18 aa, Artificial
  Peptide with targeting and/or antimicrobial activity
WSRVPGHSDTGWKVWHRW

SEQ ID NO: 1442 - protein, 7 aa, Artificial
  Peptide with targeting and/or antimicrobial activity
PPSSFLV

SEQ ID NO: 1443 - protein, 19 aa, Artificial
  Peptide with targeting and/or antimicrobial activity
TREDVFSVRLINNIVNKQA

SEQ ID NO: 1444 - protein, 21 aa, Artificial
  Peptide with targeting and/or antimicrobial activity
VLFAVYLGALDWLFSWLTQKM

SEQ ID NO: 1445 - protein, 14 aa, Artificial
  Peptide with targeting and/or antimicrobial activity
VFLLDSYCFVKINL

SEQ ID NO: 1446 - protein, 23 aa, Artificial
  Peptide with targeting and/or antimicrobial activity
SDSTNNARTRKKARDVTTKDIDK

SEQ ID NO: 1447 - protein, 12 aa, Artificial
  Peptide with targeting and/or antimicrobial activity
KYDFDDFEPEEA

SEQ ID NO: 1448 - protein, 13 aa, Artificial
  Peptide with targeting and/or antimicrobial activity
INDLLSYFTLHEK

SEQ ID NO: 1449 - protein, 12 aa, Artificial
  Peptide with targeting and/or antimicrobial activity
GLAAIATVFALY

SEQ ID NO: 1450 - protein, 9 aa, Artificial
  Peptide with targeting and/or antimicrobial activity
IPATPIIHS

SEQ ID NO: 1451 - protein, 18 aa, Artificial
  Peptide with targeting and/or antimicrobial activity
LIIYFSKTGNTARATRQI

SEQ ID NO: 1452 - protein, 24 aa, Artificial
  Peptide with targeting and/or antimicrobial activity
TTIQGVASLEKHGFRYTIIYPTRI

SEQ ID NO: 1453 - protein, 30 aa, Artificial; identical to SEQ ID NO: 834
  Peptide with targeting and/or antimicrobial activity

SEQ ID NO: 1454 - protein, 30 aa, Artificial; identical to SEQ ID NO: 835
  Peptide with targeting and/or antimicrobial activity

SEQ ID NO: 1455 - protein, 5 aa, Artificial
  Peptide with targeting and/or antimicrobial activity
LVRLA

SEQ ID NO: 1456 - protein, 26 aa, Artificial
  Peptide with targeting and/or antimicrobial activity
SRIKQDARSVRKYDRIGIFFYSFKSA

SEQ ID NO: 1457 - protein, 6 aa, Artificial
  Peptide with targeting and/or antimicrobial activity
TFILPK

SEQ ID NO: 1458 - protein, 17 aa, Artificial
  Peptide with targeting and/or antimicrobial activity
QATQIKSWIDRLLVSED

SEQ ID NO: 1459 - protein, 8 aa, Artificial
  Peptide with targeting and/or antimicrobial activity
MGDINRNF

SEQ ID NO: 1460 - protein, 27 aa, Artificial
  Peptide with targeting and/or antimicrobial activity
FTTPMIGIPAGLLGGSYYLKRREEKGK

SEQ ID NO: 1461 - protein, 5 aa, Artificial
  Peptide with targeting and/or antimicrobial activity
VRCRL

SEQ ID NO: 1462 - protein, 14 aa, Artificial
  Peptide with targeting and/or antimicrobial activity
TSGLIIGENGLNGL

SEQ ID NO: 1463 - protein, 7 aa, Artificial
  Peptide with targeting and/or antimicrobial activity
SNSVQQG

SEQ ID NO: 1464 - protein, 10 aa, Artificial
  Peptide with targeting and/or antimicrobial activity
APASPGRRPG

SEQ ID NO: 1465 - protein, 14 aa, Artificial
  Peptide with targeting and/or antimicrobial activity
GTFLGQKCAAATAS

SEQ ID NO: 1466 - protein, 23 aa, Artificial
  Peptide with targeting and/or antimicrobial activity
CPRYPFVDVGPAGPWRARWRVGS

SEQ ID NO: 1467 - protein, 11 aa, Artificial
  Peptide with targeting and/or antimicrobial activity
PRWPTGAGRHR

SEQ ID NO: 1468 - protein, 18 aa, Artificial
  Peptide with targeting and/or antimicrobial activity
FLAPARPDLQAQRQALAQ

SEQ ID NO: 1469 - protein, 16 aa, Artificial
  Peptide with targeting and/or antimicrobial activity
QSVHPLPAETPVADVI

SEQ ID NO: 1470 - protein, 9 aa, Artificial
  Peptide with targeting and/or antimicrobial activity
LSGRLAGRR

SEQ ID NO: 1471 - protein, 17 aa, Artificial
  Peptide with targeting and/or antimicrobial activity
DAPCFDDQFGDLKCQMC

SEQ ID NO: 1472 - protein, 14 aa, Artificial
  Peptide with targeting and/or antimicrobial activity
RGMFVPFHDVDCVQ

SEQ ID NO: 1473 - protein, 25 aa, Artificial
  Peptide with targeting and/or antimicrobial activity
YVANYTITQFGRDFDDRLAVAIHFA

SEQ ID NO: 1474 - protein, 21 aa, Artificial
  Peptide with targeting and/or antimicrobial activity
PTTPPPTTPPEIPTGGTVIST

SEQ ID NO: 1475 - protein, 5 aa, Artificial
  Peptide with targeting and/or antimicrobial activity
TVIST

SEQ ID NO: 1476 - protein, 16 aa, Artificial
  Peptide with targeting and/or antimicrobial activity
TDPQATAAPRRRTSPR

SEQ ID NO: 1477 - protein, 23 aa, Artificial
  Peptide with targeting and/or antimicrobial activity
PDEDIRRRAILPPAGPCRPMSPE

SEQ ID NO: 1478 - protein, 21 aa, Artificial
  Peptide with targeting and/or antimicrobial activity
GKQSRAHGPVASRREFRRKSG

SEQ ID NO: 1479 - protein, 8 aa, Artificial
  Peptide with targeting and/or antimicrobial activity
ATLIPRKA

SEQ ID NO: 1480 - protein, 14 aa, Artificial
  Peptide with targeting and/or antimicrobial activity
DQLCVEYPARVSTG

SEQ ID NO: 1481 - protein, 15 aa, Artificial
  Peptide with targeting and/or antimicrobial activity
VLRVATAVGEVPTGL

SEQ ID NO: 1482 - protein, 8 aa, Artificial
  Peptide with targeting and/or antimicrobial activity
PNRRSRPR

SEQ ID NO: 1483 - protein, 24 aa, Artificial
  Peptide with targeting and/or antimicrobial activity
PAHQRLRIDQRLVADRDMVQDYES

SEQ ID NO: 1484 - protein, 24 aa, Artificial
  Peptide with targeting and/or antimicrobial activity
TNAESMALAFRGRVHMSVNIAGLT

SEQ ID NO: 1485 - protein, 11 aa, Artificial
  Peptide with targeting and/or antimicrobial activity
TVIVAPMHSGV

SEQ ID NO: 1486 - protein, 30 aa, Artificial; identical to SEQ ID NO: 1050
  Peptide with targeting and/or antimicrobial activity

SEQ ID NO: 1487 - protein, 24 aa, Artificial
  Peptide with targeting and/or antimicrobial activity
EIIPISPTRRCEMHTMSSAEYRGL

SEQ ID NO: 1488 - protein, 8 aa, Artificial
  Peptide with targeting and/or antimicrobial activity
TCRGAGMH

SEQ ID NO: 1489 - protein, 9 aa, Artificial
  Peptide with targeting and/or antimicrobial activity
ADPHPTTGI

SEQ ID NO: 1490 - protein, 23 aa, Artificial
  Peptide with targeting and/or antimicrobial activity
TALTTVGVSGARLITYCVGVEDI

SEQ ID NO: 1491 - protein, 12 aa, Artificial
  Peptide with targeting and/or antimicrobial activity
RRGKSEQGLSRR

SEQ ID NO: 1492 - protein, 5 aa, Artificial
  Peptide with targeting and/or antimicrobial activity
LWPVA

SEQ ID NO: 1493 - protein, 17 aa, Artificial
  Peptide with targeting and/or antimicrobial activity
RKLSLASGFALWRRSLV

SEQ ID NO: 1494 - protein, 8 aa, Artificial
  Peptide with targeting and/or antimicrobial activity
PTLWLACL

SEQ ID NO: 1495 - protein, 22 aa, Artificial
  Peptide with targeting and/or antimicrobial activity
LAVLMGYIGYRGWSGKRHINRQ

SEQ ID NO: 1496 - protein, 20 aa, Artificial
  Peptide with targeting and/or antimicrobial activity
AKRVLSLAVAPHRRQPVQGT

SEQ ID NO: 1497 - protein, 10 aa, Artificial
  Peptide with targeting and/or antimicrobial activity
ARNHAVIPAG

SEQ ID NO: 1498 - protein, 30 aa, Artificial; identical to SEQ ID NO: 889
  Peptide with targeting and/or antimicrobial activity

SEQ ID NO: 1499 - protein, 19 aa, Artificial
  Peptide with targeting and/or antimicrobial activity
HRTVEFGVLGTYLVSGGSL

SEQ ID NO: 1500 - protein, 21 aa, Artificial
  Peptide with targeting and/or antimicrobial activity
GVAREDPLEPDPLAPIIDDSR

SEQ ID NO: 1501 - protein, 5 aa, Artificial
  Peptide with targeting and/or antimicrobial activity
PDPAR

SEQ ID NO: 1502 - protein, 15 aa, Artificial
  Peptide with targeting and/or antimicrobial activity
DLIRPLYSMSAPSVA

SEQ ID NO: 1503 - protein, 19 aa, Artificial
  Peptide with targeting and/or antimicrobial activity
ALSVMLGNIPLVVPNANQL

SEQ ID NO: 1504 - protein, 14 aa, Artificial
  Peptide with targeting and/or antimicrobial activity
IRSGISAAYARPLR

SEQ ID NO: 1505 - protein, 7 aa, Artificial
  Peptide with targeting and/or antimicrobial activity
RADARAK

SEQ ID NO: 1506 - protein, 15 aa, Artificial
  Peptide with targeting and/or antimicrobial activity
SSGRAGVKCRRPTGR

SEQ ID NO: 1507 - protein, 13 aa, Artificial
  Peptide with targeting and/or antimicrobial activity
GRAGVKCRRPTGR

SEQ ID NO: 1508 - protein, 8 aa, Artificial
  Peptide with targeting and/or antimicrobial activity
LNWPFTGR

SEQ ID NO: 1509 - protein, 9 aa, Artificial
  Peptide with targeting and/or antimicrobial activity
LSGRLAGRR

SEQ ID NO: 1510 - protein, 8 aa, Artificial
  Peptide with targeting and/or antimicrobial activity
APAARAAL

SEQ ID NO: 1511 - protein, 19 aa, Artificial
  Peptide with targeting and/or antimicrobial activity
KSSGSSASASSTAGGSSSK

SEQ ID NO: 1512 - protein, 17 aa, Artificial
  Peptide with targeting and/or antimicrobial activity
KSGATSAASGAKSGASS

SEQ ID NO: 1513 - protein, 20 aa, Artificial
  Peptide with targeting and/or antimicrobial activity
AKREDTVAAQIGANILNLIQ

SEQ ID NO: 1514 - protein, 25 aa, Artificial
  Peptide with targeting and/or antimicrobial activity
LGVGTFVGKVLIKNQQKQKSKKKAQ

SEQ ID NO: 1515 - protein, 38 aa, Artificial; identical to SEQ ID NO: 925
  Peptide with targeting and/or antimicrobial activity

SEQ ID NO: 1516 - protein, 11 aa, Artificial
  Peptide with targeting and/or antimicrobial activity
FLGNSQYFTRK

SEQ ID NO: 1517 - protein, 40 aa, Artificial; identical to SEQ ID NO: 927
  Peptide with targeting and/or antimicrobial activity

SEQ ID NO: 1518 - protein, 33 aa, Artificial; identical to SEQ ID NO: 928
  Peptide with targeting and/or antimicrobial activity

SEQ ID NO: 1519 - protein, 30 aa, Artificial; identical to SEQ ID NO: 931
  Peptide with targeting and/or antimicrobial activity

SEQ ID NO: 1520 - protein, 7 aa, Artificial
  Peptide with targeting and/or antimicrobial activity
DALLRLA

SEQ ID NO: 1521 - protein, 11 aa, Artificial
  Peptide with targeting and/or antimicrobial activity
PQAISSVQQNA

SEQ ID NO: 1522 - protein, 21 aa, Artificial
  Peptide with targeting and/or antimicrobial activity
DHITLDDYEIHDGFNFELYYG

SEQ ID NO: 1523 - protein, 32 aa, Artificial; identical to SEQ ID NO: 936
  Peptide with targeting and/or antimicrobial activity

SEQ ID NO: 1524 - protein, 19 aa, Artificial
  Peptide with targeting and/or antimicrobial activity
PAPAPSAPAPAPEQPEQPA

SEQ ID NO: 1525 - protein, 43 aa, Artificial; identical to SEQ ID NO: 938
  Peptide with targeting and/or antimicrobial activity

SEQ ID NO: 1526 - protein, 9 aa, Artificial
  Peptide with targeting and/or antimicrobial activity
GYFEPGKRD

SEQ ID NO: 1527 - protein, 28 aa, Artificial
  Peptide with targeting and/or antimicrobial activity
GVGIGFIMMGVVGYAVKLVHIPIRYLIV

SEQ ID NO: 1528 - protein, 29 aa, Artificial
  Peptide with targeting and/or antimicrobial activity
VSILLYLSATIILPNVLRLLVARAIIVRV

SEQ ID NO: 1529 - protein, 7 aa, Artificial
  Peptide with targeting and/or antimicrobial activity
SRFRNGV

SEQ ID NO: 1530 - protein, 25 aa, Artificial
  Peptide with targeting and/or antimicrobial activity
YNLSIYIYFLHTITIAGLITLPFII

SEQ ID NO: 1531 - protein, 27 aa, Artificial
  Peptide with targeting and/or antimicrobial activity
YFWWYWVQDCIPYKNNEVWLELSNNMK

SEQ ID NO: 1532 - protein, 36 aa, Artificial; identical to SEQ ID NO: 980
  Peptide with targeting and/or antimicrobial activity

SEQ ID NO: 1533 - protein, 33 aa, Artificial; identical to SEQ ID NO: 981
  Peptide with targeting and/or antimicrobial activity

SEQ ID NO: 1534 - protein, 24 aa, Artificial
  Peptide with targeting and/or antimicrobial activity
PLARATEVVATLFIICSLLLYLTR

SEQ ID NO: 1535 - protein, 24 aa, Artificial
  Peptide with targeting and/or antimicrobial activity
DEEALEMGANLYAQFAIDFLNSKK

SEQ ID NO: 1536 - protein, 40 aa, Artificial; identical to SEQ ID NO: 985
  Peptide with targeting and/or antimicrobial activity

SEQ ID NO: 1537 - protein, 28 aa, Artificial
  Peptide with targeting and/or antimicrobial activity
NALMLREMQLAKNIKVEVTDVLSNKKYC

SEQ ID NO: 1538 - protein, 7 aa, Artificial
  Peptide with targeting and/or antimicrobial activity
QVIVKIL

SEQ ID NO: 1539 - protein, 41 aa, Artificial; identical to SEQ ID NO: 989
  Peptide with targeting and/or antimicrobial activity

SEQ ID NO: 1540 - protein, 26 aa, Artificial
  Peptide with targeting and/or antimicrobial activity
KALVISVFAIVFSIIFVKFFYWRDKK

SEQ ID NO: 1541 - protein, 24 aa, Artificial
  Peptide with targeting and/or antimicrobial activity
FFSVIFLFGLNYLICNSPLFNILR

SEQ ID NO: 1542 - protein, 25 aa, Artificial
  Peptide with targeting and/or antimicrobial activity
KKFKIFVIINWFYHKYIILNFEENF

SEQ ID NO: 1543 - protein, 30 aa, Artificial; identical to SEQ ID NO: 994
  Peptide with targeting and/or antimicrobial activity

SEQ ID NO: 1544 - protein, 17 aa, Artificial
  Peptide with targeting and/or antimicrobial activity
DIANNILNSVSERLIIA

SEQ ID NO: 1545 - protein, 29 aa, Artificial
  Peptide with targeting and/or antimicrobial activity
MPKRHYYKLEAKALQFGLPFAYSPIQLLK

SEQ ID NO: 1546 - protein, 31 aa, Artificial; identical to SEQ ID NO: 996
  Peptide with targeting and/or antimicrobial activity

SEQ ID NO: 1547 - protein, 35 aa, Artificial; identical to SEQ ID NO: 998
  Peptide with targeting and/or antimicrobial activity

SEQ ID NO: 1548 - protein, 36 aa, Artificial; identical to SEQ ID NO: 999
  Peptide with targeting and/or antimicrobial activity

SEQ ID NO: 1549 - protein, 33 aa, Artificial; identical to SEQ ID NO: 1000
  Peptide with targeting and/or antimicrobial activity

SEQ ID NO: 1550 - protein, 27 aa, Artificial
  Peptide with targeting and/or antimicrobial activity
QWIVAKREIRMHIYCHISVIHVIIFFG

SEQ ID NO: 1551 - protein, 36 aa, Artificial; identical to SEQ ID NO: 1003
  Peptide with targeting and/or antimicrobial activity

SEQ ID NO: 1552 - protein, 22 aa, Artificial
  Peptide with targeting and/or antimicrobial activity
LILSYQASVYPLFAYLCQQKDY

SEQ ID NO: 1553 - protein, 25 aa, Artificial
  Peptide with targeting and/or antimicrobial activity
QRMYWFKRGFETGDFSAGDTFAELK

SEQ ID NO: 1554 - protein, 27 aa, Artificial
  Peptide with targeting and/or antimicrobial activity
LLASHPERLSLGVFFVYRVLHLLLENT

SEQ ID NO: 1555 - protein, 28 aa, Artificial
  Peptide with targeting and/or antimicrobial activity
DFPPLSFFRRRFHAYTAPIDNFFGANPF

SEQ ID NO: 1556 - protein, 10 aa, Artificial
  Peptide with targeting and/or antimicrobial activity
VVFGGGDRLV

SEQ ID NO: 1557 - protein, 7 aa, Artificial
  Peptide with targeting and/or antimicrobial activity
YGKESDP

SEQ ID NO: 1558 - protein, 40 aa, Artificial; identical to SEQ ID NO: 1011
  Peptide with targeting and/or antimicrobial activity

SEQ ID NO: 1559 - protein, 33 aa, Artificial; identical to SEQ ID NO: 1012
  Peptide with targeting and/or antimicrobial activity

SEQ ID NO: 1560 - protein, 41 aa, Artificial; identical to SEQ ID NO: 1013
  Peptide with targeting and/or antimicrobial activity

SEQ ID NO: 1561 - protein, 14 aa, Artificial
  Peptide with targeting and/or antimicrobial activity
GGHKQLVIEPLVSQ

SEQ ID NO: 1562 - protein, 30 aa, Artificial; identical to SEQ ID NO: 1017
  Peptide with targeting and/or antimicrobial activity

SEQ ID NO: 1563 - protein, 30 aa, Artificial; identical to SEQ ID NO: 1019
  Peptide with targeting and/or antimicrobial activity

SEQ ID NO: 1564 - protein, 29 aa, Artificial
  Peptide with targeting and/or antimicrobial activity
HPFLTGTGCPLFLIFRLFFVKAYFSFTVF

SEQ ID NO: 1565 - protein, 15 aa, Artificial
  Peptide with targeting and/or antimicrobial activity
IIIILPKIYLVCKTV

SEQ ID NO: 1566 - protein, 32 aa, Artificial; identical to SEQ ID NO: 1021
  Peptide with targeting and/or antimicrobial activity

SEQ ID NO: 1567 - protein, 24 aa, Artificial
  Peptide with targeting and/or antimicrobial activity
LSLATFAKIFMTRSNWSLKRFNRL

SEQ ID NO: 1568 - protein, 56 aa, Artificial; identical to SEQ ID NO: 138
  Peptide with targeting and/or antimicrobial activity

SEQ ID NO: 1569 - protein, 24 aa, Artificial
  Peptide with targeting and/or antimicrobial activity
FESLLPQATKKIVNNKGSKINKIF

SEQ ID NO: 1570 - protein, 25 aa, Artificial
  Peptide with targeting and/or antimicrobial activity
KKFKIFVIINWFYHKYIILNFEENF

SEQ ID NO: 1571 - protein, 21 aa, Artificial
  Peptide with targeting and/or antimicrobial activity
YIQFHLNQQPRPKVKKIKIFL

SEQ ID NO: 1572 - protein, 41 aa, Artificial; identical to SEQ ID NO: 1013
  Peptide with targeting and/or antimicrobial activity

SEQ ID NO: 1573 - protein, 44 aa, Artificial; identical to SEQ ID NO: 219
  Peptide with targeting and/or antimicrobial activity

SEQ ID NO: 1574 - protein, 30 aa, Artificial; identical to SEQ ID NO: 671
  Peptide with targeting and/or antimicrobial activity

SEQ ID NO: 1575 - protein, 20 aa, Artificial
  Peptide with targeting and/or antimicrobial activity
NYRLVNAIFSKIFKKKFIKF

SEQ ID NO: 1576 - protein, 40 aa, Artificial
  Peptide with targeting and/or antimicrobial activity
MAWKFIKLDKVVSQKECNNFLEKEENKKLLKLLRIQKNMR

SEQ ID NO: 1577 - protein, 37 aa, Artificial
  Peptide with targeting and/or antimicrobial activity
MDIWKFIKSFNTVNTYLLLSCVLLIILVLYFYVINPA

SEQ ID NO: 1578 - protein, 22 aa, Artificial
  Peptide with targeting and/or antimicrobial activity
LVLRICTDLFTFIKWTIKQRKS

SEQ ID NO: 1579 - protein, 21 aa, Artificial
  Peptide with targeting and/or antimicrobial activity
DLCGQEFIKFKTCVTNQLAKK

SEQ ID NO: 1580 - protein, 27 aa, Artificial
  Peptide with targeting and/or antimicrobial activity
DLLKSLLGQDGAKNDEIIEFIKIIMEK

SEQ ID NO: 1581 - protein, 19 aa, Artificial
  Peptide with targeting and/or antimicrobial activity
DEIKVSDEEIEKFIKENNL

SEQ ID NO: 1582 - protein, 37 aa, Artificial
  Peptide with targeting and/or antimicrobial activity
LICEVVKPEEDFIKVKLNEDNVTAKISREFIAKKIDA

SEQ ID NO: 1583 - protein, 35 aa, Artificial; identical to SEQ ID NO: 141
  Peptide with targeting and/or antimicrobial activity

SEQ ID NO: 1584 - protein, 20 aa, Artificial
  Peptide with targeting and/or antimicrobial activity
NYRLVNAIFSKIFKKKFIKF

SEQ ID NO: 1585 - protein, 31 aa, Artificial; identical to SEQ ID NO: 269
  Peptide with targeting and/or antimicrobial activity

SEQ ID NO: 1586 - protein, 30 aa, Artificial; identical to SEQ ID NO: 1019
  Peptide with targeting and/or antimicrobial activity

SEQ ID NO: 1587 - protein, 21 aa, Artificial
  Peptide with targeting and/or antimicrobial activity
MGIIAGIIKFIKGLIEKFTGK

SEQ ID NO: 1588 - protein, 23 aa, Artificial
  Peptide with targeting and/or antimicrobial activity
LIQKGLNQTFIVVIRLNNFIKKS

SEQ ID NO: 1589 - protein, 30 aa, Artificial; identical to SEQ ID NO: 363
  Peptide with targeting and/or antimicrobial activity

SEQ ID NO: 1590 - protein, 40 aa, Artificial; identical to SEQ ID NO: 522
  Peptide with targeting and/or antimicrobial activity

SEQ ID NO: 1591 - protein, 25 aa, Artificial
  Peptide with targeting and/or antimicrobial activity
LNFRAENKILEKIHISLIDTVEGSA

SEQ ID NO: 1592 - protein, 18 aa, Artificial
  Peptide with targeting and/or antimicrobial activity
KTPNDKIHKTIIIKHIIL

SEQ ID NO: 1593 - protein, 6 aa, Artificial
  Peptide with targeting and/or antimicrobial activity
HIKETR

SEQ ID NO: 1594 - protein, 41 aa, Artificial; identical to SEQ ID NO: 567
  Peptide with targeting and/or antimicrobial activity

SEQ ID NO: 1595 - protein, 12 aa, Artificial
  Peptide with targeting and/or antimicrobial activity
HKNKLNIPHIKS

SEQ ID NO: 1596 - protein, 41 aa, Artificial
  Peptide with targeting and/or antimicrobial activity
MTLTIKIKHRSKIVPLNLISLVYAFFTYNFVANRIMFLTND

SEQ ID NO: 1597 - protein, 11 aa, Artificial
  Peptide with targeting and/or antimicrobial activity
PEIIKIVSGLL

SEQ ID NO: 1598 - protein, 23 aa, Artificial
  Peptide with targeting and/or antimicrobial activity
MLTSRKKRLKKIVEEQNKKDESI

SEQ ID NO: 1599 - protein, 24 aa, Artificial
  Peptide with targeting and/or antimicrobial activity
FESLLPQATKKIVNNKGSKINKIF

SEQ ID NO: 1600 - protein, 16 aa, Artificial
  Peptide with targeting and/or antimicrobial activity
TEQAKKIVDILNNWLE

SEQ ID NO: 1601 - protein, 25 aa, Artificial
  Peptide with targeting and/or antimicrobial activity
FEDIEQIIKYHLIDGKIVAPLLLDR

SEQ ID NO: 1602 - protein, 23 aa, Artificial
  Peptide with targeting and/or antimicrobial activity
KRGSKIVIAIAVVLIVLAGVWVW

SEQ ID NO: 1603 - protein, 25 aa, Artificial
  Peptide with targeting and/or antimicrobial activity
ALDCSEQSVILWYETILDKIVGVIK

SEQ ID NO: 1604 - protein, 38 aa, Artificial; identical to SEQ ID NO: 527
  Peptide with targeting and/or antimicrobial activity

SEQ ID NO: 1605 - protein, 38 aa, Artificial; identical to SEQ ID NO: 501
  Peptide with targeting and/or antimicrobial activity

SEQ ID NO: 1606 - protein, 33 aa, Artificial; identical to SEQ ID NO: 790
  Peptide with targeting and/or antimicrobial activity

SEQ ID NO: 1607 - protein, 19 aa, Artificial
  Peptide with targeting and/or antimicrobial activity
ALCSVIKAIELGIINVHLQ

SEQ ID NO: 1608 - protein, 24 aa, Artificial
  Peptide with targeting and/or antimicrobial activity
NGDKKAKEELDKWDEVIKELNIQF

SEQ ID NO: 1609 - protein, 32 aa, Artificial; identical to SEQ ID NO: 38
  Peptide with targeting and/or antimicrobial activity

SEQ ID NO: 1610 - protein, 15 aa, Artificial
  Peptide with targeting and/or antimicrobial activity
VIKISVPGQVQMLIP

SEQ ID NO: 1611 - protein, 32 aa, Artificial; identical to SEQ ID NO: 750
  Peptide with targeting and/or antimicrobial activity

SEQ ID NO: 1612 - protein, 20 aa, Artificial
  Peptide with targeting and/or antimicrobial activity
AIEGVIKKGACFKLLRHEMF

SEQ ID NO: 1613 - protein, 18 aa, Artificial
  Peptide with targeting and/or antimicrobial activity
KRKHENVIVAEEMRVIKN

SEQ ID NO: 1614 - protein, 21 aa, Artificial
  Peptide with targeting and/or antimicrobial activity
MGIIAGIIKVIKSLIEQFTGK

SEQ ID NO: 1615 - protein, 30 aa, Artificial; identical to SEQ ID NO: 393
  Peptide with targeting and/or antimicrobial activity

SEQ ID NO: 1616 - protein, 25 aa, Artificial
  Peptide with targeting and/or antimicrobial activity
ALDCSEQSVILWYETILDKIVGVIK

SEQ ID NO: 1617 - protein, 28 aa, Artificial
  Peptide with targeting and/or antimicrobial activity
WSESQPPTATPRPHAEVARAGLVTPPTL

SEQ ID NO: 1618 - protein, 30 aa, Artificial; identical to SEQ ID NO: 931
  Peptide with targeting and/or antimicrobial activity

SEQ ID NO: 1619 - protein, 30 aa, Artificial; identical to SEQ ID NO: 1050
  Peptide with targeting and/or antimicrobial activity

SEQ ID NO: 1620 - protein, 18 aa, Artificial
  Peptide with targeting and/or antimicrobial activity
VMFVLTRGRSPRPMIPAY

SEQ ID NO: 1621 - protein, 22 aa, Artificial
  Peptide with targeting and/or antimicrobial activity
LSPRPIIVSRRSRADNNNDWSR

SEQ ID NO: 1622 - protein, 28 aa, Artificial
  Peptide with targeting and/or antimicrobial activity
VLPFPAIPLSRRRACVAAPRPRSRQRAS

SEQ ID NO: 1623 - protein, 21 aa, Artificial
  Peptide with targeting and/or antimicrobial activity
YIQFHLNQQPRPKVKKIKIFL

SEQ ID NO: 1624 - protein, 13 aa, Artificial
  Peptide with targeting and/or antimicrobial activity
RRLASRRSLVVST

SEQ ID NO: 1625 - protein, 35 aa, Artificial
  Peptide with targeting and/or antimicrobial activity
RLLGLYGENSAAGFIASVIGAVIILFIYNLIARKS

SEQ ID NO: 1626 - protein, 28 aa, Artificial
  Peptide with targeting and/or antimicrobial activity
GHLRVCWILWLQSANPLSFRHHYLAVMW

SEQ ID NO: 1627 - protein, 37 aa, Artificial; identical to SEQ ID NO: 1577
  Peptide with targeting and/or antimicrobial activity

SEQ ID NO: 1628 - protein, 39 aa, Artificial
  Peptide with targeting and/or antimicrobial activity
MIIQNKKIEKIYKYQTKEIFLNKTSLRAGFVFRMVRVLI

SEQ ID NO: 1629 - protein, 40 aa, Artificial
  Peptide with targeting and/or antimicrobial activity
MLIDWQEPDIEKSFCAAFLKISVSVLVYRTPLGYGNQLRE

SEQ ID NO: 1630 - protein, 10 aa, Artificial
  Peptide with targeting and/or antimicrobial activity
FFDGEVGCGC

SEQ ID NO: 1631 - protein, 14 aa, Artificial
  Peptide with targeting and/or antimicrobial activity
ILEQNIEEVFFIQS

SEQ ID NO: 1632 - protein, 34 aa, Artificial
  Peptide with targeting and/or antimicrobial activity
MDKIRIWNNFHISNEYIKQRYGIISIPLFYVYLF

SEQ ID NO: 1633 - protein, 39 aa, Artificial
  Peptide with targeting and/or antimicrobial activity
FAKKNPCRMRVPNTGTWYLVVNQDGNSGIVNFSINTIQN

SEQ ID NO: 1634 - protein, 31 aa, Artificial
  Peptide with targeting and/or antimicrobial activity
MLVFQMRYQMRYVDKTSTVLKQTKNSDYADK

SEQ ID NO: 1635 - protein, 36 aa, Artificial
  Peptide with targeting and/or antimicrobial activity
MLMNFEVYQQRILIIYNKCYHLKAVGKNLQLFIIVD

SEQ ID NO: 1636 - protein, 35 aa, Artificial; identical to SEQ ID NO: 1222
  Peptide with targeting and/or antimicrobial activity

SEQ ID NO: 1637 - protein, 13 aa, Artificial
  Peptide with targeting and/or antimicrobial activity
DDKNEGKIAQGEY

SEQ ID NO: 1638 - protein, 7 aa, Artificial
  Peptide with targeting and/or antimicrobial activity
EASVYRE

SEQ ID NO: 1639 - protein, 30 aa, Artificial
  Peptide with targeting and/or antimicrobial activity
MVKHNFDVTDKTGKISSKHCFEITDKTDVV

SEQ ID NO: 1640 - protein, 20 aa, Artificial
  Peptide with targeting and/or antimicrobial activity
DRPSQTTHHTLSSSRITGPS

SEQ ID NO: 1641 - protein, 19 aa, Artificial
  Peptide with targeting and/or antimicrobial activity
EALLPPDPPDEDSQRIIPQ

SEQ ID NO: 1642 - protein, 20 aa, Artificial
  Peptide with targeting and/or antimicrobial activity
DRPSQTTHHTLSSSRITGPS

SEQ ID NO: 1643 - protein, 14 aa, Artificial
  Peptide with targeting and/or antimicrobial activity
LEDTKALFPCFVPI

SEQ ID NO: 1644 - protein, 17 aa, Artificial
  Peptide with targeting and/or antimicrobial activity
KKYSSFKSMIDDLEYDA

SEQ ID NO: 1645 - protein, 12 aa, Artificial
  Peptide with targeting and/or antimicrobial activity
FKSMIDDLEYDA

SEQ ID NO: 1646 - protein, 16 aa, Artificial
  Peptide with targeting and/or antimicrobial activity
TEQAKKIVDILNNWLE

SEQ ID NO: 1647 - protein, 17 aa, Artificial
  Peptide with targeting and/or antimicrobial activity
STSPSVTSVYAEALGLK

SEQ ID NO: 1648 - protein, 17 aa, Artificial
  Peptide with targeting and/or antimicrobial activity
VGAMAIFLNVVAMLAGV

SEQ ID NO: 1649 - protein, 17 aa, Artificial
  Peptide with targeting and/or antimicrobial activity
ARTIQNNGCLIHNSRYP

SEQ ID NO: 1650 - protein, 19 aa, Artificial
  Peptide with targeting and/or antimicrobial activity
CDDLYALEAQGTLNELLKK

SEQ ID NO: 1651 - protein, 10 aa, Artificial
  Peptide with targeting and/or antimicrobial activity
TPEPVVIVKP

SEQ ID NO: 1652 - protein, 25 aa, Artificial
  Peptide with targeting and/or antimicrobial activity
FEDIEQIIKYHLIDGKIVAPLLLDR

SEQ ID NO: 1653 - protein, 23 aa, Artificial
  Peptide with targeting and/or antimicrobial activity
SDIIAEMFQQGELEPMLRDAVAA

SEQ ID NO: 1654 - protein, 15 aa, Artificial
  Peptide with targeting and/or antimicrobial activity
KGSASGSASGSGSAK

SEQ ID NO: 1655 - protein, 14 aa, Artificial
  Peptide with targeting and/or antimicrobial activity
KSGASSVASAAKSG

SEQ ID NO: 1656 - protein, 10 aa, Artificial
  Peptide with targeting and/or antimicrobial activity
AAATTATTAK

SEQ ID NO: 1657 - protein, 20 aa, Artificial
  Peptide with targeting and/or antimicrobial activity
TKGTTTGTAKTTGVTTGTAK

SEQ ID NO: 1658 - protein, 13 aa, Artificial
  Peptide with targeting and/or antimicrobial activity
GSRGGAKRGGARG

SEQ ID NO: 1659 - protein, 28 aa, Artificial
  Peptide with targeting and/or antimicrobial activity
WSESQPPTATPRPHAEVARAGLVTPPTL

SEQ ID NO: 1660 - protein, 26 aa, Artificial
  Peptide with targeting and/or antimicrobial activity
QPIGFPTDSVHGTDLVHRLRGTTSSR

SEQ ID NO: 1661 - protein, 37 aa, Artificial
  Peptide with targeting and/or antimicrobial activity
LENLDIEGLTEMKEHIEDLIAEKSAAESIEEVIVEAE

SEQ ID NO: 1662 - protein, 38 aa, Artificial
  Peptide with targeting and/or antimicrobial activity
AYSLTFQNPNDNLTDEEVAKYMEKITKALTEKIGAEVR

SEQ ID NO: 1663 - protein, 28 aa, Artificial
  Peptide with targeting and/or antimicrobial activity
PLTRETFAERGIRKARVARTFSEEEPPF

SEQ ID NO: 1664 - protein, 16 aa, Artificial
  Peptide with targeting and/or antimicrobial activity
RGLRRLGRRGLRRLGR

SEQ ID NO: 1665 - protein, 13 aa, Artificial
  Peptide with targeting and/or antimicrobial activity
KPVLPVLPVLPVL

SEQ ID NO: 1666 - protein, 16 aa, Artificial
  Peptide with targeting and/or antimicrobial activity
VLRIIRIAVLRIIRIA

SEQ ID NO: 1667 - protein, 15 aa, Artificial
  Peptide with targeting and/or antimicrobial activity
LPETGGSGGSLPETG

SEQ ID NO: 1668 - protein, 11 aa, Artificial
  Peptide with targeting and/or antimicrobial activity
RAHIRRAHIRR

SEQ ID NO: 1669 - protein, 14 aa, Artificial
  Peptide with targeting and/or antimicrobial activity
DEDEDDEEDDDEEE

SEQ ID NO: 1670 - protein, 15 aa, Artificial
  Peptide with targeting and/or antimicrobial activity
STMCGSTMCGSTMCG

SEQ ID NO: 1671 - protein, 12 aa, Artificial
  Peptide with targeting and/or antimicrobial activity
VRLPLWLPSLNE

SEQ ID NO: 1672 - protein, 12 aa, Artificial
  Peptide with targeting and/or antimicrobial activity
ANYFLPPVLSSS

SEQ ID NO: 1673 - protein, 12 aa, Artificial
  Peptide with targeting and/or antimicrobial activity
SHPWNAQRELSV

SEQ ID NO: 1674 - protein, 12 aa, Artificial
  Peptide with targeting and/or antimicrobial activity
SVSVGMRPMPRP

SEQ ID NO: 1675 - protein, 12 aa, Artificial
  Peptide with targeting and/or antimicrobial activity
WTPLHPSTNRPP

SEQ ID NO: 1676 - protein, 12 aa, Artificial
  Peptide with targeting and/or antimicrobial activity
SVSVGMKPSPRP

SEQ ID NO: 1677 - protein, 12 aa, Artificial
  Peptide with targeting and/or antimicrobial activity
SVSVGMKPSPRP

SEQ ID NO: 1678 - protein, 12 aa, Artificial
  Peptide with targeting and/or antimicrobial activity
SVPVGPYNESQP

SEQ ID NO: 1679 - protein, 12 aa, Artificial
  Peptide with targeting and/or antimicrobial activity
WAPPLFRSSLFY

SEQ ID NO: 1680 - protein, 12 aa, Artificial
  Peptide with targeting and/or antimicrobial activity
  misc_feature (5)..(5): Xaa can be any naturally occurring amino acid
  misc_feature (7)..(7): Xaa can be any naturally occurring amino acid
WAPPXPXSSLFY

SEQ ID NO: 1681 - protein, 12 aa, Artificial
  Peptide with targeting and/or antimicrobial activity
HHGWTHHWPPPP

SEQ ID NO: 1682 - protein, 12 aa, Artificial
  Peptide with targeting and/or antimicrobial activity
SYYSLPPIFHIP

SEQ ID NO: 1683 - protein, 13 aa, Artificial
  Peptide with targeting and/or antimicrobial activity
HFQENPLSRGGEL

SEQ ID NO: 1684 - protein, 12 aa, Artificial
  Peptide with targeting and/or antimicrobial activity
FSYSPTRAPLNM

SEQ ID NO: 1685 - protein, 12 aa, Artificial
  Peptide with targeting and/or antimicrobial activity
  misc_feature (2)..(2): Xaa can be any naturally occurring amino acid
  misc_feature (4)..(5): Xaa can be any naturally occurring amino acid
  misc_feature (8)..(8): Xaa can be any naturally occurring amino acid
  misc_feature (10)..(12): Xaa can be any naturally occurring amino acid
SXPXXMKXSXXX

SEQ ID NO: 1686 - protein, 12 aa, Artificial
  Peptide with targeting and/or antimicrobial activity
VSRHQSWHPHDL

SEQ ID NO: 1687 - protein, 12 aa, Artificial
  Peptide with targeting and/or antimicrobial activity
  misc_feature (3)..(3): Xaa can be any naturally occurring amino acid
  misc_feature (10)..(10): Xaa can be any naturally occurring amino acid
DYXYRGLPRXET

SEQ ID NO: 1688 - protein, 12 aa, Artificial
  Peptide with targeting and/or antimicrobial activity
SVSVGMKPSPRP

SEQ ID NO: 1689 - protein, 12 aa, Artificial
  Peptide with targeting and/or antimicrobial activity
  misc_feature (1)..(2): Xaa can be any naturally occurring amino acid
  misc_feature (5)..(12): Xaa can be any naturally occurring amino acid
XXHEXXXXXXXX

SEQ ID NO: 1690 - protein, 12 aa, Artificial
  Peptide with targeting and/or antimicrobial activity
KHLQNRSTGYET

SEQ ID NO: 1691 - protein, 12 aa, Artificial
  Peptide with targeting and/or antimicrobial activity
HIHSLSPSKTWP

SEQ ID NO: 1692 - protein, 12 aa, Artificial
  Peptide with targeting and/or antimicrobial activity
TITPTDAEMPFL

SEQ ID NO: 1693 - protein, 12 aa, Artificial
  Peptide with targeting and/or antimicrobial activity
HLLESGVLERGM

SEQ ID NO: 1694 - protein, 12 aa, Artificial
  Peptide with targeting and/or antimicrobial activity
HDRYHIPPLQLH

SEQ ID NO: 1695 - protein, 12 aa, Artificial
  Peptide with targeting and/or antimicrobial activity
VNTLQNVRHMAA

SEQ ID NO: 1696 - protein, 12 aa, Artificial
  Peptide with targeting and/or antimicrobial activity
SNYMKLRAVSPF

SEQ ID NO: 1697 - protein, 12 aa, Artificial
  Peptide with targeting and/or antimicrobial activity
NLQMPYAWRTEF

SEQ ID NO: 1698 - protein, 12 aa, Artificial
  Peptide with targeting and/or antimicrobial activity
QKPLTGPHFSLI

SEQ ID NO: 1699 - protein, 21 aa, Artificial
  Peptide with targeting and/or antimicrobial activity
SGSLSTFFRLFNRSFTQALGK

SEQ ID NO: 1700 - protein, 18 aa, Artificial
  Peptide with targeting and/or antimicrobial activity
LSTFFRLFNRSFTQALGK

SEQ ID NO: 1701 - protein, 16 aa, Artificial
  Peptide with targeting and/or antimicrobial activity
TFFRLFNRSFTQALGK

SEQ ID NO: 1702 - protein, 8 aa, Artificial
  Peptide with targeting and/or antimicrobial activity
TFFRLFNR

SEQ ID NO: 1703 - protein, 12 aa, Artificial
  Peptide with targeting and/or antimicrobial activity
KKHRKHRKHRKH

SEQ ID NO: 1704 - protein, 7 aa, Artificial
  Peptide with targeting and/or antimicrobial activity
LVTLVFV

SEQ ID NO: 1705 - protein, 8 aa, Artificial
  Peptide with targeting and/or antimicrobial activity
YSTCDFIM

SEQ ID NO: 1706 - protein, 9 aa, Artificial
  Peptide with targeting and/or antimicrobial activity
GVNACSSLF

SEQ ID NO: 1707 - protein, 8 aa, Artificial
  Peptide with targeting and/or antimicrobial activity
YINCDFLL

SEQ ID NO: 1708 - protein, 36 aa, Artificial
  Peptide with targeting and/or antimicrobial activity
ITSISLCTPGCKTGALMGCNMRTATCIICSIIIVSK

SEQ ID NO: 1709 - protein, 26 aa, Artificial
  Peptide with targeting and/or antimicrobial activity
KSSAYSLQMGATAIKQVKKLFKKWGW

SEQ ID NO: 1710 - protein, 9 aa, Artificial
  Peptide with targeting and/or antimicrobial activity
WWYNWWQDW

SEQ ID NO: 1711 - protein, 16 aa, Artificial
  Peptide with targeting and/or antimicrobial activity
RQIKIWFWNRRMKWKK

SEQ ID NO: 1712 - protein, 11 aa, Artificial
  Peptide with targeting and/or antimicrobial activity
EHWSYCDLRPG

SEQ ID NO: 1713 - protein, 12 aa, Artificial
  Peptide with targeting and/or antimicrobial activity
KETWWETWWTEW

SEQ ID NO: 1714 - protein, 27 aa, Artificial
  Peptide with targeting and/or antimicrobial activity
MRKEFHNVLSSGQLLADKRPARDYNRK

SEQ ID NO: 1715 - protein, 27 aa, Artificial
  Peptide with targeting and/or antimicrobial activity
LKQKIKHVVKLKVVVKLRSQLVKRKQN

SEQ ID NO: 1716 - protein, 15 aa, Artificial
  Peptide with targeting and/or antimicrobial activity
STMMSRSHKTRSHHV

SEQ ID NO: 1717 - protein, 16 aa, Artificial
  Peptide with targeting and/or antimicrobial activity
GAHWQFNALTVRGGGS

SEQ ID NO: 1718 - protein, 15 aa, Artificial
  Peptide with targeting and/or antimicrobial activity
KQRTSIRATEGCLPS

SEQ ID NO: 1719 - protein, 10 aa, Artificial
  Peptide with targeting and/or antimicrobial activity
QEKIRVRLSA

SEQ ID NO: 1720 - protein, 20 aa, Artificial
  Peptide with targeting and/or antimicrobial activity
QLKTADLPAGRDETTSFVLV

SEQ ID NO: 1721 - protein, 34 aa, Artificial
  Peptide with targeting and/or antimicrobial activity
GFKLKGMARISCLPNGQWSNFPPKCIRECAMVSS

SEQ ID NO: 1722 - protein, 34 aa, Artificial
  Peptide with targeting and/or antimicrobial activity
HAEHKVKIGVEQKYGQFPQGTEVTYTCSGNYFLM

SEQ ID NO: 1723 - protein, 20 aa, Artificial
  Peptide with targeting and/or antimicrobial activity
AMDMYSIEDRYFGGYAPEVG

SEQ ID NO: 1724 - protein, 28 aa, Artificial
  Peptide with targeting and/or antimicrobial activity
ASQQGTAALQKELKRIKPDYSDSFKIKH

SEQ ID NO: 1725 - protein, 35 aa, Artificial
  Peptide with targeting and/or antimicrobial activity
SSQISMVPNVGLKFSISNANIKISGKWKAQKRFLK

SEQ ID NO: 1726 - protein, 28 aa, Artificial
  Peptide with targeting and/or antimicrobial activity
VHVHISKSKVGWLIQLFHKKIESALRNK

SEQ ID NO: 1727 - protein, 29 aa, Artificial
  Peptide with targeting and/or antimicrobial activity
AAQEGLLALQSELLRITLPDFTGDLRIPH

SEQ ID NO: 1728 - protein, 35 aa, Artificial
  Peptide with targeting and/or antimicrobial activity
HSALRPVPGQGLSLSISDSSIRVQGRWKVRKSFFK

SEQ ID NO: 1729 - protein, 27 aa, Artificial
  Peptide with targeting and/or antimicrobial activity
VEVDMSGDLGWLLNLFHNQIESKFQKV

SEQ ID NO: 1730 - protein, 8 aa, Artificial
  Peptide with targeting and/or antimicrobial activity
ATYPLPIR

SEQ ID NO: 1731 - protein, 4 aa, Artificial
  Peptide with targeting and/or antimicrobial activity
NHFL

SEQ ID NO: 1732 - protein, 5 aa, Artificial
  Peptide with targeting and/or antimicrobial activity
NHFLP

SEQ ID NO: 1733 - protein, 7 aa, Artificial
  Peptide with targeting and/or antimicrobial activity
TSQNVRT

SEQ ID NO: 1734 - protein, 7 aa, Artificial
  Peptide with targeting and/or antimicrobial activity
  misc_feature (4)..(4): Xaa can be any naturally occurring amino acid
  misc_feature (6)..(6): Xaa can be any naturally occurring amino acid
TYPXPXR

SEQ ID NO: 1735 - protein, 7 aa, Artificial
  Peptide with targeting and/or antimicrobial activity
TSQNVRT

SEQ ID NO: 1736 - protein, 7 aa, Artificial
  Peptide with targeting and/or antimicrobial activity
TYPLPIR

SEQ ID NO: 1737 - protein, 8 aa, Artificial
  Peptide with targeting and/or antimicrobial activity
TFRRLKWK

SEQ ID NO: 1738 - protein, 12 aa, Artificial
  Peptide with targeting and/or antimicrobial activity
RWKVRKSFFKLQ

SEQ ID NO: 1739 - protein, 12 aa, Artificial
  Peptide with targeting and/or antimicrobial activity
KWKAQKRFLKMS

SEQ ID NO: 1740 - protein, 17 aa, Artificial
  Peptide with targeting and/or antimicrobial activity
KCTSDQDEQFIPKGCSK

SEQ ID NO: 1741 - protein, 7 aa, Artificial
  Peptide with targeting and/or antimicrobial activity
YSPWTNF

SEQ ID NO: 1742 - protein, 21 aa, Artificial
  Peptide with targeting and/or antimicrobial activity
MKQQKKHIAALLFALILTLVS

SEQ ID NO: 1743 - protein, 7 aa, Artificial
  Peptide with targeting and/or antimicrobial activity
SIFTLVA

SEQ ID NO: 1744 - protein, 8 aa, Artificial
  Peptide with targeting and/or antimicrobial activity
LFSLVLAG

SEQ ID NO: 1745 - protein, 7 aa, Artificial
  Peptide with targeting and/or antimicrobial activity
AIFILAS

SEQ ID NO: 1746 - protein, 8 aa, Artificial
  Peptide with targeting and/or antimicrobial activity
FLVMFLSG

SEQ ID NO: 1747 - protein, 22 aa, Artificial
  Peptide with targeting and/or antimicrobial activity
DSIRDVSPTFNKIRRWFDGLFK

SEQ ID NO: 1748 - protein, 22 aa, Artificial
  Peptide with targeting and/or antimicrobial activity
MSKRAMKKIIPLITLFVVTLVG

SEQ ID NO: 1749 - protein, 9 aa, Artificial
  Peptide with targeting and/or antimicrobial activity
KDEIYWKPS

SEQ ID NO: 1750 - protein, 8 aa, Artificial
  Peptide with targeting and/or antimicrobial activity
YSTCDFIM

SEQ ID NO: 1751 - protein, 18 aa, Artificial
  Peptide with targeting and/or antimicrobial activity
GLWEDLLYNINRYAHYIT

SEQ ID NO: 1752 - protein, 19 aa, Artificial
  Peptide with targeting and/or antimicrobial activity
DIRHRINNSIWRDIFLKRK

SEQ ID NO: 1753 - protein, 19 aa, Artificial
  Peptide with targeting and/or antimicrobial activity
DVRSNKIRLWWENIFFNKK

SEQ ID NO: 1754 - protein, 8 aa, Artificial
  Peptide with targeting and/or antimicrobial activity
PTTREWDG

SEQ ID NO: 1755 - protein, 12 aa, Artificial
  Peptide with targeting and/or antimicrobial activity
LQIYTNGNWVPS

SEQ ID NO: 1756 - protein, 22 aa, Artificial
  Peptide with targeting and/or antimicrobial activity
MSKRAMKKIIPLITLFVVTLVG

SEQ ID NO: 1757 - protein, 21 aa, Artificial
  Peptide with targeting and/or antimicrobial activity
GAGKNLIYGMGYGYLRSCNRL

SEQ ID NO: 1758 - protein, 17 aa, Artificial
  Peptide with targeting and/or antimicrobial activity
EMRLSKFFRDFILQRKK

SEQ ID NO: 1759 - protein, 12 aa, Artificial
  Peptide with targeting and/or antimicrobial activity
WSEIEINTKQSN

SEQ ID NO: 1760 - protein, 10 aa, Artificial
  Peptide with targeting and/or antimicrobial activity
HISKERFEAY

SEQ ID NO: 1761 - protein, 21 aa, Artificial
  Peptide with targeting and/or antimicrobial activity
KYKCSWCKRVYTLRKDHRTAR

SEQ ID NO: 1762 - protein, 12 aa, Artificial
  Peptide with targeting and/or antimicrobial activity
WSEIEINTKQSN

SEQ ID NO: 1763 - protein, 23 aa, Artificial
  Peptide with targeting and/or antimicrobial activity
MKTTLKKLSRYIAVVIAITLIFI

SEQ ID NO: 1764 - protein, 10 aa, Artificial
  Peptide with targeting and/or antimicrobial activity
HISKERFEAY

SEQ ID NO: 1765 - protein, 17 aa, Artificial
  Peptide with targeting and/or antimicrobial activity
DKRLPYFFKHLFSNRTK

SEQ ID NO: 1766 - protein, 16 aa, Artificial
  Peptide with targeting and/or antimicrobial activity
EMRKPDGALFNLFRRR

SEQ ID NO: 1767 - protein, 16 aa, Artificial
  Peptide with targeting and/or antimicrobial activity
EMRKSNNNFFHFLRRI

SEQ ID NO: 1768 - protein, 17 aa, Artificial
  Peptide with targeting and/or antimicrobial activity
ESRLPKIRFDFIFPRKK

SEQ ID NO: 1769 - protein, 16 aa, Artificial
  Peptide with targeting and/or antimicrobial activity
EIRQTHNIFFNFFKRR

SEQ ID NO: 1770 - protein, 17 aa, Artificial
  Peptide with targeting and/or antimicrobial activity
DWRISETIRNLIFPRRK

SEQ ID NO: 1771 - protein, 8 aa, Artificial
  Peptide with targeting and/or antimicrobial activity
VAVLVLGA

SEQ ID NO: 1772 - protein, 11 aa, Artificial
  Peptide with targeting and/or antimicrobial activity
FFEDDKRKSFI

SEQ ID NO: 1773 - protein, 11 aa, Artificial
  Peptide with targeting and/or antimicrobial activity
FFEDDKRKSFI

SEQ ID NO: 1774 - protein, 40 aa, Artificial
  Peptide with targeting and/or antimicrobial activity
MKQKMYEAIAHLFKYVGAKQLVMCCVGIWFETKIPDELRK

SEQ ID NO: 1775 - protein, 40 aa, Artificial; identical to SEQ ID NO: 1774
  Peptide with targeting and/or antimicrobial activity

SEQ ID NO: 1776 - protein, 14 aa, Artificial
  Peptide with targeting and/or antimicrobial activity
VVAYVITQVGAIRF

SEQ ID NO: 1777 - protein, 14 aa, Artificial
  Peptide with targeting and/or antimicrobial activity
VVAYVITQVGAIRF

SEQ ID NO: 1778 - protein, 25 aa, Artificial
  Peptide with targeting and/or antimicrobial activity
LLKLQDDYLLHLERHRRTKKIIDEN

SEQ ID NO: 1779 - protein, 31 aa, Artificial
  Peptide with targeting and/or antimicrobial activity
EDIKDLTDKVQSLNALVQSELNKLIKRKDQS

SEQ ID NO: 1780 - protein, 19 aa, Artificial
  Peptide with targeting and/or antimicrobial activity
WFLDFSDWLSKVPSKLWAE

SEQ ID NO: 1781 - protein, 31 aa, Artificial; identical to SEQ ID NO: 1779
  Peptide with targeting and/or antimicrobial activity

SEQ ID NO: 1782 - protein, 19 aa, Artificial
  Peptide with targeting and/or antimicrobial activity
WFLDFSDWLSKVPSKLWAE

SEQ ID NO: 1783 - protein, 40 aa, Artificial
  Peptide with targeting and/or antimicrobial activity
MLSIFAQTTQTSASEPQQSPTAPQGRDNGSPIGYSSCVVA

SEQ ID NO: 1784 - protein, 38 aa, Artificial
  Peptide with targeting and/or antimicrobial activity
MLSIFETVAAAAPVTVAETQQASNNENRGQPGYYCLIA

SEQ ID NO: 1785 - protein, 34 aa, Artificial
  Peptide with targeting and/or antimicrobial activity
PSLPSSPPSLLPPLPLLKLLATRRPTLVGMTLCV

SEQ ID NO: 1786 - protein, 42 aa, Artificial
  Peptide with targeting and/or antimicrobial activity
MDSMANSVSSSSVVNAGNKPAETLNKTVKNYTPKVPYMCVIA

SEQ ID NO: 1787 - protein, 39 aa, Artificial
  Peptide with targeting and/or antimicrobial activity
MDTFTYVDLAAVAAAAVADEVPRDFEDQITDYQSYCIIC

SEQ ID NO: 1788 - protein, 10 aa, Artificial
  Peptide with targeting and/or antimicrobial activity
SNVHGWCVVA

SEQ ID NO: 1789 - protein, 11 aa, Artificial
  Peptide with targeting and/or antimicrobial activity
NTTAHGWCVVA

SEQ ID NO: 1790 - protein, 36 aa, Artificial
  Peptide with targeting and/or antimicrobial activity
MQPSTVTAAPKDKTSAEKKDNYIIKGVFWDPACVIA

SEQ ID NO: 1791 - protein, 9 aa, Artificial
  Peptide with targeting and/or antimicrobial activity
GPTWWCVNA

SEQ ID NO: 1792 - protein, 10 aa, Artificial
  Peptide with targeting and/or antimicrobial activity
SGPTWFCIIQ

SEQ ID NO: 1793 - protein, 31 aa, Artificial
  Peptide with targeting and/or antimicrobial activity
FTAIFSTLSSSVASKTDAPRNEEAYSSGNSP

SEQ ID NO: 1794 - protein, 42 aa, Artificial
  Peptide with targeting and/or antimicrobial activity
MFSIFAQPAQTSVSETQESPANHGANPGKSGSGLGYSTCVVA

SEQ ID NO: 1795 - protein, 11 aa, Artificial
  Peptide with targeting and/or antimicrobial activity
NTTAHGWCVVA

SEQ ID NO: 1796 - protein, 9 aa, Artificial
  Peptide with targeting and/or antimicrobial activity
SDDNYGSLA

SEQ ID NO: 1797 - protein, 10 aa, Artificial
  Peptide with targeting and/or antimicrobial activity
NGLTFWCVIA

SEQ ID NO: 1798 - protein, 8 aa, Artificial
  Peptide with targeting and/or antimicrobial activity
PSWFCVIA

SEQ ID NO: 1799 - protein, 8 aa, Artificial
  Peptide with targeting and/or antimicrobial activity
ASWFCTIA

SEQ ID NO: 1800 - protein, 25 aa, Artificial
  Peptide with targeting and/or antimicrobial activity
PHHKIANASDKRRRMYFEIFMCAVL

SEQ ID NO: 1801 - protein, 40 aa, Artificial; identical to SEQ ID NO: 1783
  Peptide with targeting and/or antimicrobial activity

SEQ ID NO: 1802 - protein, 38 aa, Artificial; identical to SEQ ID NO: 1784
  Peptide with targeting and/or antimicrobial activity

SEQ ID NO: 1803 - protein, 10 aa, Artificial
  Peptide with targeting and/or antimicrobial activity
SLTYAWCVVA

SEQ ID NO: 1804 - protein, 11 aa, Artificial
  Peptide with targeting and/or antimicrobial activity
TSMAHAWCVVA

SEQ ID NO: 1805 - protein, 6 aa, Artificial
  Peptide with targeting and/or antimicrobial activity
GYCVVA

SEQ ID NO: 1806 - protein, 40 aa, Artificial; identical to SEQ ID NO: 1783
  Peptide with targeting and/or antimicrobial activity

SEQ ID NO: 1807 - protein, 41 aa, Artificial
  Peptide with targeting and/or antimicrobial activity
MDSMANTVSSSVVNTGNKPSETLNKTVKNYTPKVPYMCVIA

SEQ ID NO: 1808 - protein, 39 aa, Artificial
  Peptide with targeting and/or antimicrobial activity
MFSLFETVAAAVKVVSAAEPEHAPTNEGKGEPAPYCIIA

SEQ ID NO: 1809 - protein, 8 aa, Artificial
  Peptide with targeting and/or antimicrobial activity
LTWFCVIA

SEQ ID NO: 1810 - protein, 18 aa, Artificial
  Peptide with targeting and/or antimicrobial activity
LREKRRRRWFEAFMGFGL

SEQ ID NO: 1811 - protein, 40 aa, Artificial; identical to SEQ ID NO: 1783
  Peptide with targeting and/or antimicrobial activity

SEQ ID NO: 1812 - protein, 40 aa, Artificial
  Peptide with targeting and/or antimicrobial activity
MDALTLFAPVSLGAVATEQAPVDEERPNRQTFPWIGCVVA

SEQ ID NO: 1813 - protein, 38 aa, Artificial
  Peptide with targeting and/or antimicrobial activity
MFIFESVVASVQAVSVAEQDQTPVSEGRGKPAVYCTIA

SEQ ID NO: 1814 - protein, 33 aa, Artificial
  Peptide with targeting and/or antimicrobial activity
PWMSLLFSFLALLALILPKLSKDDPLGLTRQPR

SEQ ID NO: 1815 - protein, 31 aa, Artificial
  Peptide with targeting and/or antimicrobial activity
ASISLIMEGSANIEAVGKLVWLAAALPLAFI

SEQ ID NO: 1816 - protein, 34 aa, Artificial
  Peptide with targeting and/or antimicrobial activity
ARNVYPSVETPLLQGAAPHDNKQSLVESPPPYVP

SEQ ID NO: 1817 - protein, 14 aa, Artificial
  Peptide with targeting and/or antimicrobial activity
FLKKLNRKIASIFN

SEQ ID NO: 1818 - protein, 20 aa, Artificial
  Peptide with targeting and/or antimicrobial activity
DSISRQGSISSGPPPRSPNK

SEQ ID NO: 1819 - protein, 5 aa, Artificial
  Peptide with targeting and/or antimicrobial activity
NNWNN

SEQ ID NO: 1820 - protein, 30 aa, Artificial
  Peptide with targeting and/or antimicrobial activity
GIPCGESCVWIPCISAALGCSCKNKVCYRN

SEQ ID NO: 1821 - protein, 38 aa, Artificial
  Peptide with targeting and/or antimicrobial activity
DFASCHTNGGICLPNRCPGHMIQIGICFRPRVKCCRSW

SEQ ID NO: 1822 - protein, 38 aa, Artificial
  Peptide with targeting and/or antimicrobial activity
GPLSCGRNGGVCIPIRCPVPMRQIGTCFGRPVKCCRSW

SEQ ID NO: 1823 - protein, 76 aa, Artificial
  Peptide with targeting and/or antimicrobial activity
SAFTVWSGPGCNNRAERYSKCGCSAIHQKGGYDFSYTGQTAALYNQAGCSGVAHTRFGSSARACNPFGWKSIFIQC

SEQ ID NO: 1824 - protein, 44 aa, Artificial
  Peptide with targeting and/or antimicrobial activity
YSRCQLQGFNCVVRSYGLPTIPCCRGLTCRSYFPGSTYGRCQRY

SEQ ID NO: 1825 - protein, 48 aa, Artificial
  Peptide with targeting and/or antimicrobial activity
VNYGNGVSCSKTKCSVNWGQAFQERYTAGINSFVSGVASGAGSIGRRP

SEQ ID NO: 1826 - protein, 25 aa, Artificial
  Peptide with targeting and/or antimicrobial activity
RSVCRQIKICRRRGGCYYKCTNRPY

SEQ ID NO: 1827 - protein, 13 aa, Artificial
  Peptide with targeting and/or antimicrobial activity
VRRFPWWWPFLRR

SEQ ID NO: 1828 - protein, 14 aa, Artificial
  Peptide with targeting and/or antimicrobial activity
INLKALAALAKKIL

SEQ ID NO: 1829 - protein, 20 aa, Artificial
  Peptide with targeting and/or antimicrobial activity
KWKLFKKIGIGKFLHSAKKF

SEQ ID NO: 1830 - protein, 30 aa, Artificial
  Peptide with targeting and/or antimicrobial activity
DCYCRIPACIAGERRYGTCIYQGRLWAFCC

SEQ ID NO: 1831 - protein, 62 aa, Artificial
  Peptide with targeting and/or antimicrobial activity
YLAFRCGRYSPCLDDGPNVNLYSCCSFYNCHKCLARLENCPKGLHYNAYLKVCDWPSKAGCT

SEQ ID NO: 1832 - protein, 23 aa, Artificial
  Peptide with targeting and/or antimicrobial activity
GIGKYLHSAKKFGKAWVGEIMNS

SEQ ID NO: 1833 - protein, 36 aa, Artificial
  Peptide with targeting and/or antimicrobial activity
DHYNCVSSGGQCLYSACPIFTKIQGTCYRGKAKCCK

SEQ ID NO: 1834 - protein, 32 aa, Artificial
  Peptide with targeting and/or antimicrobial activity
MPCSCKKYCDPWEVIDGSCGLFNSKYICCREK

SEQ ID NO: 1835 - protein, 18 aa, Artificial
  Peptide with targeting and/or antimicrobial activity
KWKLFKKIPKFLHSAKKF

SEQ ID NO: 1836 - protein, 20 aa, Artificial
  Peptide with targeting and/or antimicrobial activity
KLKLFKKIGIGKFLHSAKKF

SEQ ID NO: 1837 - protein, 20 aa, Artificial
  Peptide with targeting and/or antimicrobial activity
KAKLFKKIGIGKFLHSAKKF

SEQ ID NO: 1838 - protein, 41 aa, Artificial
  Peptide with targeting and/or antimicrobial activity
GIGDPVTCLKSGAICHPVFCPRRYKQIGTCGLPGTKCCKKP

SEQ ID NO: 1839 - protein, 39 aa, Artificial
  Peptide with targeting and/or antimicrobial activity
GFGCPNNYQCHRHCKSIPGRCGGYCGGWHRLPCTCYRCG

SEQ ID NO: 1840 - protein, 29 aa, Artificial
  Peptide with targeting and/or antimicrobial activity
RGLRRLGRKIAHGVKKYGPTVLRIIRIAG

SEQ ID NO: 1841 - protein, 13 aa, Artificial
  Peptide with targeting and/or antimicrobial activity
ILPWKWPWWPWRR

SEQ ID NO: 1842 - protein, 21 aa, Artificial
  Peptide with targeting and/or antimicrobial activity
VGIGTPISFYGGGAGHVPEYF

SEQ ID NO: 1843 - protein, 13 aa, Artificial
  Peptide with targeting and/or antimicrobial activity
ILAWKWAWWAWRR

SEQ ID NO: 1844 - protein, 18 aa, Artificial
  Peptide with targeting and/or antimicrobial activity
KNLRRIIRKIIHIIKKYG

SEQ ID NO: 1845 - protein, 18 aa, Artificial
  Peptide with targeting and/or antimicrobial activity
KNLRRIIRKGIHIIKKYG

SEQ ID NO: 1846 - protein, 18 aa, Artificial
  Peptide with targeting and/or antimicrobial activity
KNLRRITRKIIHIIKKYG

SEQ ID NO: 1847 - protein, 18 aa, Artificial
  Peptide with targeting and/or antimicrobial activity
GFCRCLCRRGVCRCICTR

SEQ ID NO: 1848 - protein, 44 aa, Artificial
  Peptide with targeting and/or antimicrobial activity
DKLIGSCVWGAVNYTSDCNGECLLRGYKGGHCGSFANVNCWCET

SEQ ID NO: 1849 - protein, 40 aa, Artificial
  Peptide with targeting and/or antimicrobial activity
ATCDLLSGTGINHSACAAHCLLRGNRGGYCNGKGVCVCRN

SEQ ID NO: 1850 - protein, 15 aa, Artificial
  Peptide with targeting and/or antimicrobial activity
VGALAVVVWLFLWLW

SEQ ID NO: 1851 - protein, 15 aa, Artificial
  Peptide with targeting and/or antimicrobial activity
VGALAVVVWLYLWLW

SEQ ID NO: 1852 - protein, 18 aa, Artificial
  Peptide with targeting and/or antimicrobial activity
ECRRLCYKQRCVTYCRGR

SEQ ID NO: 1853 - protein, 45 aa, Artificial
  Peptide with targeting and/or antimicrobial activity
GIINTLQKYYCRVRGGRCAVLSCLPKEEQIGKCSTRGRKCCRRKK

SEQ ID NO: 1854 - protein, 42 aa, Artificial
  Peptide with targeting and/or antimicrobial activity
AKIPIKAIKTVGKAVGKGLRAINIASTANDVFNFLKPKKRKA

SEQ ID NO: 1855 - protein, 40 aa, Artificial
  Peptide with targeting and/or antimicrobial activity
ATCDLLSGTGINHSACAAHCLLRGNRGGYCNGKAVCVCRN

SEQ ID NO: 1856 - protein, 83 aa, Artificial
  Peptide with targeting and/or antimicrobial activity
GRDYRTCLTIVQKLKKMVDKPTQRSVSNAATRVCTRGRSRWRDVCRNFMRRYQSRVIQGLVAGETAQQICEDLRLCIPSTGPL

SEQ ID NO: 1857 - protein, 25 aa, Artificial
  Peptide with targeting and/or antimicrobial activity
FKCRRWQWRMKKLGAPSITCVRRAF

SEQ ID NO: 1858 - protein, 25 aa, Artificial
  Peptide with targeting and/or antimicrobial activity
DTHFPICIFCCGCCHRSKCGMCCKT

SEQ ID NO: 1859 - protein, 15 aa, Artificial
  Peptide with targeting and/or antimicrobial activity
VGALAVVVWLWLWLW

SEQ ID NO: 1860 - protein, 36 aa, Artificial
  Peptide with targeting and/or antimicrobial activity
ACNFQSCWATCQAQHSIYFRRAFCDRSQCKCVFVRG

SEQ ID NO: 1861 - protein, 30 aa, Artificial
  Peptide with targeting and/or antimicrobial activity
VGECVRGRCPSGMCCSQFGYCGKGPKYCGR

SEQ ID NO: 1862 - protein, 20 aa, Artificial
  Peptide with targeting and/or antimicrobial activity
CTFTLPGGGGVCTLTSECIC

SEQ ID NO: 1863 - protein, 78 aa, Artificial
  Peptide with targeting and/or antimicrobial activity
GYFCESCRKIIQKLEDMVGPQPNEDTVTQAASQVCDKLKILRGLCKKIMRSFLRRISWDILTGKKPQAICVDIKICKE

SEQ ID NO: 1864 - protein, 43 aa, Artificial
  Peptide with targeting and/or antimicrobial activity
KYYGNGVHCGKHSCTVDWGTAIGNIGNNAAANWATGGNAGWNK

SEQ ID NO: 1865 - protein, 18 aa, Artificial
  Peptide with targeting and/or antimicrobial activity
RGGRLCYCRRRFCVCVGR

SEQ ID NO: 1866 - protein, 35 aa, Artificial
  Peptide with targeting and/or antimicrobial activity
NKGCATCSIGAACLVDGPIPDFEIAGATGLFGLWG

SEQ ID NO: 1867 - protein, 21 aa, Artificial
  Peptide with targeting and/or antimicrobial activity
VGIGTPIFSYGGGAGHVPEYF

SEQ ID NO: 1868 - protein, 18 aa, Artificial
  Peptide with targeting and/or antimicrobial activity
RRWCFRVCYRGFCYRKCR

SEQ ID NO: 1869 - protein, 13 aa, Artificial
  Peptide with targeting and/or antimicrobial activity
ILGKIWEGIKSLF

SEQ ID NO: 1870 - protein, 38 aa, Artificial
  Peptide with targeting and/or antimicrobial activity
SFGLCRLRRGFCARGRCRFPSIPIGRCSRFVQCCRRVW

SEQ ID NO: 1871 - protein, 13 aa, Artificial
  Peptide with targeting and/or antimicrobial activity
GLFDIIKKIAESF

SEQ ID NO: 1872 - protein, 17 aa, Artificial
  Peptide with targeting and/or antimicrobial activity
KWCFRVCYRGICYRRCR

SEQ ID NO: 1873 - protein, 33 aa, Artificial
  Peptide with targeting and/or antimicrobial activity
GFFALIPKIISSPLFKTLLSAVGSALSSSGGQE

SEQ ID NO: 1874 - protein, 25 aa, Artificial
  Peptide with targeting and/or antimicrobial activity
NLVSGLIEARKYLEQLHRKLKNCKV

SEQ ID NO: 1875 - protein, 47 aa, Artificial
  Peptide with targeting and/or antimicrobial activity
HSSGYTRPLRKPSRPIFIRPIGCDVCYGIPSSTARLCCFRYGDCCHL

SEQ ID NO: 1876 - protein, 26 aa, Artificial
  Peptide with targeting and/or antimicrobial activity
KSSAYSLQMGATAIKQVKKLFKKWGW

SEQ ID NO: 1877 - protein, 25 aa, Artificial
  Peptide with targeting and/or antimicrobial activity
GWGSFFKKAAHVGKHVGKAALTHYL

SEQ ID NO: 1878 - protein, 49 aa, Artificial
  Peptide with targeting and/or antimicrobial activity
GRRRRSVQWCAVSQPEATKCFQWQRNMRKVRGPPVSCIKRDSPIQCIQA

SEQ ID NO: 1879 - protein, 40 aa, Artificial
  Peptide with targeting and/or antimicrobial activity
GFGCNGPWDEDDMQCHNHCKSIKGYKGGYCAKGGFVCKCY

SEQ ID NO: 1880 - protein, 29 aa, Artificial
  Peptide with targeting and/or antimicrobial activity
CYCRIPACIAGERRYGTCIYQGRLWAFCC

SEQ ID NO: 1881 - protein, 34 aa, Artificial
  Peptide with targeting and/or antimicrobial activity
VCSCRLVFCRRTELRVGNCLIGGVSFTYCCTRVD

SEQ ID NO: 1882 - protein, 35 aa, Artificial
  Peptide with targeting and/or antimicrobial activity
QARATCYCRTGRCATRESLSGVCEISGRLYRLCCR

SEQ ID NO: 1883 - protein, 35 aa, Artificial
  Peptide with targeting and/or antimicrobial activity
STRAFTCHCRRSCYSTEYSYGTCTVMGINHRFCCL

SEQ ID NO: 1884 - protein, 25 aa, Artificial
  Peptide with targeting and/or antimicrobial activity
HVDKKVADKVLLLKQLRIMRLLTRL

SEQ ID NO: 1885 - protein, 42 aa, Artificial
  Peptide with targeting and/or antimicrobial activity
RGFRKHFNKLVKKVKHTISETAHVAKDTAVIAGSGAAVVAAT

SEQ ID NO: 1886 - protein, 41 aa, Artificial
  Peptide with targeting and/or antimicrobial activity
ARSYGNGVYCNNKKCWVNRGEATQSIIGGMISGWASGLAGM

SEQ ID NO: 1887 - protein, 43 aa, Artificial
  Peptide with targeting and/or antimicrobial activity
GFGCPGNQLKCNNHCKSISCRAGYCDAATLWLRCTCTDCNGKK

SEQ ID NO: 1888 - protein, 47 aa, Artificial
  Peptide with targeting and/or antimicrobial activity
AIKLVQSPNGNFAASFVLDGTKWIFKSKYYDSSKGYWVGIYEVWDRK

SEQ ID NO: 1889 - protein, 42 aa, Artificial
  Peptide with targeting and/or antimicrobial activity
YVSCLFRGARCRVYSGRSCCFGYYCRRDFPGSIFGTCSRRNF

SEQ ID NO: 1890 - protein, 42 aa, Artificial
  Peptide with targeting and/or antimicrobial activity
YITCLFRGARCRVYSGRSCCFGYYCRRDFPGSIFGTCSRRNF

SEQ ID NO: 1891 - protein, 31 aa, Artificial
  Peptide with targeting and/or antimicrobial activity
CGESCVFIPCISTLLGCSCKNKVCYRNGVIP

SEQ ID NO: 1892 - protein, 13 aa, Artificial
  Peptide with targeting and/or antimicrobial activity
RLFDKIRQVIRKF

SEQ ID NO: 1893 - protein, 13 aa, Artificial
  Peptide with targeting and/or antimicrobial activity
FKRIVQRIKDFLR

SEQ ID NO: 1894 - protein, 37 aa, Artificial
  Peptide with targeting and/or antimicrobial activity
GILDTLKQFAKGVGKDLVKGAAQGVLSTVSCKLAKTC

SEQ ID NO: 1895 - protein, 26 aa, Artificial
  Peptide with targeting and/or antimicrobial activity
GLFGKLIKKFGRKAISYAVKKARGKH

SEQ ID NO: 1896 - protein, 32 aa, Artificial
  Peptide with targeting and/or antimicrobial activity
LVQRGRFGRFLRKIRRFRPKVTITIQGSARFG

SEQ ID NO: 1897 - protein, 47 aa, Artificial
  Peptide with targeting and/or antimicrobial activity
KTCENLANTYRGPCFTTGSCDDHCKNKEHLRSGRCRDDFRCWCTRNC

SEQ ID NO: 1898 - protein, 32 aa, Artificial
  Peptide with targeting and/or antimicrobial activity
GLLCYCRKGHCKRGERVRGTCGIRFLYCCPRR

SEQ ID NO: 1899 - protein, 29 aa, Artificial
  Peptide with targeting and/or antimicrobial activity
RVKRFWPLVPVAINTVAAGINLYKAIRRK

SEQ ID NO: 1900 - protein, 15 aa, Artificial
  Peptide with targeting and/or antimicrobial activity
KWKLFKKIGAVLKVL

SEQ ID NO: 1901 - protein, 21 aa, Artificial
  Peptide with targeting and/or antimicrobial activity
RWCVYAYVRIRGVLVRYRRCW

SEQ ID NO: 1902 - protein, 22 aa, Artificial
  Peptide with targeting and/or antimicrobial activity
FFHHIFRGIVHVGKTIHRLVTG

SEQ ID NO: 1903 - protein, 39 aa, Artificial
  Peptide with targeting and/or antimicrobial activity
GTWDDIGQGIGRVAYWVGKALGNLSDVNQASRINRKKKH

SEQ ID NO: 1904 - protein, 19 aa, Artificial
  Peptide with targeting and/or antimicrobial activity
FLSLIPHAINAVSTLVHHF

SEQ ID NO: 1905 - protein, 19 aa, Artificial
  Peptide with targeting and/or antimicrobial activity
FLSLIPHAINAVSAIAKHN

SEQ ID NO: 1906 - protein, 19 aa, Artificial
  Peptide with targeting and/or antimicrobial activity
FLSLIPHAINAVSALANHG

SEQ ID NO: 1907 - protein, 21 aa, Artificial
  Peptide with targeting and/or antimicrobial activity
RWCVYAYVRVRGVLVRYRRCW

SEQ ID NO: 1908 - protein, 32 aa, Artificial
  Peptide with targeting and/or antimicrobial activity
GILSSFKGVAKGVAKDLAGKLLETLKCKITGC

SEQ ID NO: 1909 - protein, 35 aa, Artificial
  Peptide with targeting and/or antimicrobial activity
GFGALFKFLAKKVAKTVAKQAAKQGAKYVVNKQME

SEQ ID NO: 1910 - protein, 37 aa, Artificial
  Peptide with targeting and/or antimicrobial activity
LLGDFFRKSKEKIGKEFKRIVQRIKDFLRNLVPRTES

SEQ ID NO: 1911 - protein, 37 aa, Artificial
  Peptide with targeting and/or antimicrobial activity
KYYGNGVHCTKSGCSVNWGEAFSAGVHRLANGGNGFW

SEQ ID NO: 1912 - protein, 23 aa, Artificial
  Peptide with targeting and/or antimicrobial activity
GIGKFLHSAKKFGKAFVGEIMNS

SEQ ID NO: 1913 - protein, 26 aa, Artificial
  Peptide with targeting and/or antimicrobial activity
GIGAVLKVLTTGLPALISWIKRKRQQ

SEQ ID NO: 1914 - protein, 26 aa, Artificial
  Peptide with targeting and/or antimicrobial activity
SMWSGMWRRKLKKLRNALKKKLKGEK

SEQ ID NO: 1915 - protein, 30 aa, Artificial
  Peptide with targeting and/or antimicrobial activity
ACYCRIPACIAGERRYGTCIYQGRLWAFCC

SEQ ID NO: 1916 - protein, 17 aa, Artificial
  Peptide with targeting and/or antimicrobial activity
ALYKKFKKKLLKSLKRL

SEQ ID NO: 1917 - protein, 21 aa, Artificial
  Peptide with targeting and/or antimicrobial activity
GSKKPVPIIYCNRRTGKCQRM

SEQ ID NO: 1918 - protein, 7 aa, Artificial
  Peptide with targeting and/or antimicrobial activity
GSEIQPR

SEQ ID NO: 1919 - protein, 21 aa, Artificial
  Peptide with targeting and/or antimicrobial activity
KSWSLCTPGCARTGSFNSYCC

SEQ ID NO: 1920 - protein, 37 aa, Artificial
  Peptide with targeting and/or antimicrobial activity
SRWPSPGRPRPFPGRPKPIFRPRPCNCYAPPCPCDRW

SEQ ID NO: 1921 - protein, 25 aa, Artificial
  Peptide with targeting and/or antimicrobial activity
GSGVIPTISHECHMNSFQFVFTCCS

SEQ ID NO: 1922 - protein, 32 aa, Artificial
  Peptide with targeting and/or antimicrobial activity
DLRFWNPREKLPLPTLPPFNPKPIYIDMGNRY

SEQ ID NO: 1923 - protein, 34 aa, Artificial
  Peptide with targeting and/or antimicrobial activity
VFIDILDKMENAIHKAAQAGIGIAKPIEKMILPK

SEQ ID NO: 1924 - protein, 36 aa, Artificial
  Peptide with targeting and/or antimicrobial activity
SIGTAVKKAVPIAKKVGKVAIPIAKAVLSVVGQLVG

SEQ ID NO: 1925 - protein, 31 aa, Artificial
  Peptide with targeting and/or antimicrobial activity
GWFGKAFRSVSNFYKKHKTYIHAGLSAATLL

SEQ ID NO: 1926 - protein, 32 aa, Artificial
  Peptide with targeting and/or antimicrobial activity
GWLRKAAKSVGKFYYKHKYYIKAAWQIGKHAL

SEQ ID NO: 1927 - protein, 32 aa, Artificial
  Peptide with targeting and/or antimicrobial activity
GWLRKAAKSVGKFYYKHKYYIKAAWKIGRHAL

SEQ ID NO: 1928 - protein, 27 aa, Artificial
  Peptide with targeting and/or antimicrobial activity
NRWWQGVVPTVSYECRMNSWQHVFTCC

SEQ ID NO: 1929 - protein, 38 aa, Artificial
  Peptide with targeting and/or antimicrobial activity
AKCIKNGKGCREDQGPPFCCSGFCYRQVGWARGYCKNR

SEQ ID NO: 1930 - protein, 42 aa, Artificial
  Peptide with targeting and/or antimicrobial activity
AKIPIKAIKTVGKAVGKGLRAINIASTANDVFNFLKPKKRKH

SEQ ID NO: 1931 - protein, 13 aa, Artificial
  Peptide with targeting and/or antimicrobial activity
SYSMEHFRWGKPV

SEQ ID NO: 1932 - protein, 33 aa, Artificial
  Peptide with targeting and/or antimicrobial activity
VVCACRRALCLPRERRAGFCRIRGRIHPLCCRR

SEQ ID NO: 1933 - protein, 33 aa, Artificial
  Peptide with targeting and/or antimicrobial activity
VVCACRRALCLPLERRAGFCRIRGRIHPLCCRR

SEQ ID NO: 1934 - protein, 24 aa, Artificial
  Peptide with targeting and/or antimicrobial activity
GIGALSAKGALKGLAKGLAEHFAN

SEQ ID NO: 1935 - protein, 37 aa, Artificial
  Peptide with targeting and/or antimicrobial activity
KWKLFKKIEKVGQNIRDGIIKAGPAVAVVGQATQIAK

SEQ ID NO: 1936 - protein, 35 aa, Artificial
  Peptide with targeting and/or antimicrobial activity
KWKIFKKIEKVGRNIRNGIIKAGPAVAVLGEAKAL

SEQ ID NO: 1937 - protein, 36 aa, Artificial
  Peptide with targeting and/or antimicrobial activity
WNPFKELERAGQRVRDAIISAGPAVATVAQATALAK

SEQ ID NO: 1938 - protein, 13 aa, Artificial
  Peptide with targeting and/or antimicrobial activity
FLPLILRKIVTAL

SEQ ID NO: 1939 - protein, 35 aa, Artificial
  Peptide with targeting and/or antimicrobial activity
RWKIFKKIEKMGRNIRDGIVKAGPAIEVLGSAKAI

SEQ ID NO: 1940 - protein, 14 aa, Artificial
  Peptide with targeting and/or antimicrobial activity
INLKAIAALAKKLL

SEQ ID NO: 1941 - protein, 47 aa, Artificial
  Peptide with targeting and/or antimicrobial activity
SDEKASPDKHHRFSLSRYAKLANRLANPKLLETFLSKWIGDRGNRSV

SEQ ID NO: 1942 - protein, 33 aa, Artificial
  Peptide with targeting and/or antimicrobial activity
VFCTCRGFLCGSGERASGSCTINGVRHTLCCRR

SEQ ID NO: 1943 - protein, 33 aa, Artificial
  Peptide with targeting and/or antimicrobial activity
VSCTCRRFSCGFGERASGSCTVNGVRHTLCCRR

SEQ ID NO: 1944 - protein, 34 aa, Artificial
  Peptide with targeting and/or antimicrobial activity
GRCVCRKQLLCSYRERRIGDCKIRGVRFPFCCPR

SEQ ID NO: 1945 - protein, 33 aa, Artificial
  Peptide with targeting and/or antimicrobial activity
ICACRRRFCPNSERFSGYCRVNGARYVRCCSRR

SEQ ID NO: 1946 - protein, 34 aa, Artificial
  Peptide with targeting and/or antimicrobial activity
GICACRRRFCPNSERFSGYCRVNGARYVRCCSRR

SEQ ID NO: 1947 - protein, 17 aa, Artificial
  Peptide with targeting and/or antimicrobial activity
SKITDILAKLGKVLAHV

SEQ ID NO: 1948 - protein, 17 aa, Artificial
  Peptide with targeting and/or antimicrobial activity
IKIMDILAKLGKVLAHV

SEQ ID NO: 1949 - protein, 17 aa, Artificial
  Peptide with targeting and/or antimicrobial activity
INIKDILAKLVKVLGHV

SEQ ID NO: 1950 - protein, 17 aa, Artificial
  Peptide with targeting and/or antimicrobial activity
INVLGILGLLGKALSHL

SEQ ID NO: 1951 - protein, 47 aa, Artificial
  Peptide with targeting and/or antimicrobial activity
KSCCRNTWARNCYNVCRLPGTISREICAKKCDCKIISGTTCPSDYPK

SEQ ID NO: 1952 - protein, 39 aa, Artificial
  Peptide with targeting and/or antimicrobial activity
GWLKKIGKKIERVGQHTRDATIQGLGIAQQAANVAATAR

SEQ ID NO: 1953 - protein, 39 aa, Artificial
  Peptide with targeting and/or antimicrobial activity
GWLKKIGKKIERVGQHTRDATIQVIGVAQQAANVAATAR

SEQ ID NO: 1954 - protein, 39 aa, Artificial
  Peptide with targeting and/or antimicrobial activity
GWLRKIGKKIERVGQHTRDATIQVLGIAQQAANVAATAR

SEQ ID NO: 1955 - protein, 17 aa, Artificial
  Peptide with targeting and/or antimicrobial activity
IKITTMLAKLGKVLAHV

SEQ ID NO: 1956 - protein, 32 aa, Artificial
  Peptide with targeting and/or antimicrobial activity
WKSESLCTPGCVTGALQTCFLQTLTCNCKISK

SEQ ID NO: 1957 - protein, 35 aa, Artificial
  Peptide with targeting and/or antimicrobial activity
LRDLVCYCRARGCKGRERMNGTCRKGHLLYMLCCR

SEQ ID NO: 1958 - protein, 34 aa, Artificial
  Peptide with targeting and/or antimicrobial activity
ITSISLCTPGCKTGALMGCNMKTATCHCSIHVSK

SEQ ID NO: 1959 - protein, 17 aa, Artificial
  Peptide with targeting and/or antimicrobial activity
RWCFRVCYRGICYRKCR

SEQ ID NO: 1960 - protein, 18 aa, Artificial
  Peptide with targeting and/or antimicrobial activity
RRWCFRVCYKGFCYRKCR

SEQ ID NO: 1961 - protein, 31 aa, Artificial
  Peptide with targeting and/or antimicrobial activity
SWLSKTAKKLENSAKKRISEGIAIAIQGGPR

SEQ ID NO: 1962 - protein, 37 aa, Artificial
  Peptide with targeting and/or antimicrobial activity
WNPFKELERAGQRVRDAVISAAPAVATVGQAAAIARG

SEQ ID NO: 1963 - protein, 37 aa, Artificial
  Peptide with targeting and/or antimicrobial activity
WNPFKELERAGQRVRDAIISAGPAVATVGQAAAIARG

SEQ ID NO: 1964 - protein, 37 aa, Artificial
  Peptide with targeting and/or antimicrobial activity
WNPFKELERAGQRVRDAIISAAPAVATVGQAAAIARG

SEQ ID NO: 1965 - protein, 36 aa, Artificial
  Peptide with targeting and/or antimicrobial activity
WNPFKELERAGQRVRDAVISAAAVATVGQAAAIARG

SEQ ID NO: 1966 - protein, 35 aa, Artificial
  Peptide with targeting and/or antimicrobial activity
RWKIFKKIEKVGQNIRDGIVKAGPAVAVVGQAATI

SEQ ID NO: 1967 - protein, 34 aa, Artificial
  Peptide with targeting and/or antimicrobial activity
YVPLPNVPQPGRRPFPTFPGQGPFNPKIKWPQGY

SEQ ID NO: 1968 - protein, 24 aa, Artificial
  Peptide with targeting and/or antimicrobial activity
DSHAKRHHGYKRKFHEKHHSHRGY

SEQ ID NO: 1969 - protein, 32 aa, Artificial
  Peptide with targeting and/or antimicrobial activity
DSHAKRHHGYKRKFHEKHHSHRGYRSNYLYDN

SEQ ID NO: 1970 - protein, 12 aa, Artificial
  Peptide with targeting and/or antimicrobial activity
KFHEKHHSHRGY

SEQ ID NO: 1971 - protein, 51 aa, Artificial
  Peptide with targeting and/or antimicrobial activity
VTCDLLSFKGQVNDSACAANCLSLGKAGGHCEKVGCICRKTSFKDLWDKRF

SEQ ID NO: 1972 - protein, 17 aa, Artificial
  Peptide with targeting and/or antimicrobial activity
KWCFRVCYRGICYRKCR

SEQ ID NO: 1973 - protein, 40 aa, Artificial
  Peptide with targeting and/or antimicrobial activity
GWIRDFGKRIERVGQHTRDATIQTIAVAQQAANVAATLKG

SEQ ID NO: 1974 - protein, 34 aa, Artificial
  Peptide with targeting and/or antimicrobial activity
TAGPAIRASVKQCQKTLKATRLFTVSCKGKNGCK

SEQ ID NO: 1975 - protein, 43 aa, Artificial
  Peptide with targeting and/or antimicrobial activity
RFRPPIRRPPIRPPFYPPFRPPIRPPIFPPIRPPFRPPLGPFP

SEQ ID NO: 1976 - protein, 60 aa, Artificial
  Peptide with targeting and/or antimicrobial activity
RRIRPRPPRLPRPRPRPLPFPRPGPRPIPRPLPFPRPGPRPIPRPLPFPRPGPRPIPRPL

SEQ ID NO: 1977 - protein, 14 aa, Artificial
  Peptide with targeting and/or antimicrobial activity
LKLKSIVSWAKKVL

SEQ ID NO: 1978 - protein, 34 aa, Artificial
  Peptide with targeting and/or antimicrobial activity
VFIDILDKVENAIHNAAQVGIGFAKPFEKLINPK

SEQ ID NO: 1979 - protein, 12 aa, Artificial
  Peptide with targeting and/or antimicrobial activity
RLCRIVVIRVCR

SEQ ID NO: 1980 - protein, 37 aa, Artificial
  Peptide with targeting and/or antimicrobial activity
STPVLASVAVSMELLPTASVLYSDVAGCFKYSAKHHC

SEQ ID NO: 1981 - protein, 25 aa, Artificial
  Peptide with targeting and/or antimicrobial activity
GWASKIGQTLGKIAKVGLKELIQPK

SEQ ID NO: 1982 - protein, 38 aa, Artificial
  Peptide with targeting and/or antimicrobial activity
NPVSCVRNKGICVPIRCPGSMKQIGTCVGRAVKCCRKK

SEQ ID NO: 1983 - protein, 37 aa, Artificial
  Peptide with targeting and/or antimicrobial activity
GLRKRLRKFRNKIKEKLKKIGQKIQGFVPKLAPRTDY

SEQ ID NO: 1984 - protein, 37 aa, Artificial
  Peptide with targeting and/or antimicrobial activity
QCIGNGGRCNENVGPPYCCSGFCLRQPGQGYGYCKNR

SEQ ID NO: 1985 - protein, 36 aa, Artificial
  Peptide with targeting and/or antimicrobial activity
CIGNGGRCNENVGPPYCCSGFCLRQPNQGYGVCRNR

SEQ ID NO: 1986 - protein, 35 aa, Artificial
  Peptide with targeting and/or antimicrobial activity
LRDLVCYCRKRGCKRRERMNGTCRKGHLMYTLCCR

SEQ ID NO: 1987 - protein, 33 aa, Artificial
  Peptide with targeting and/or antimicrobial activity
RSGRGECRRQCLRRHEGQPWETQECMRRCRRRG

SEQ ID NO: 1988 - protein, 27 aa, Artificial
  Peptide with targeting and/or antimicrobial activity
GIGASILSAGKSALKGLAKGLAEHFAN

SEQ ID NO: 1989 - protein, 27 aa, Artificial
  Peptide with targeting and/or antimicrobial activity
GIGSAILSAGKSALKGLAKGLAEHFAN

SEQ ID NO: 1990 - protein, 25 aa, Artificial
  Peptide with targeting and/or antimicrobial activity
GIGAAILSAGKSALKGLAKGLAEHF

SEQ ID NO: 1991 - protein, 25 aa, Artificial
  Peptide with targeting and/or antimicrobial activity
GIGAAILSAGKSIIKGLANGLAEHF

SEQ ID NO: 1992 - protein, 44 aa, Artificial
  Peptide with targeting and/or antimicrobial activity
KYYGNGVTCGKHSCSVDWGKATTCIINNGAMAWATGGHQGNHKC

SEQ ID NO: 1993 - protein, 34 aa, Artificial
  Peptide with targeting and/or antimicrobial activity
ITSISLCTPGCKTGALMGCNMKTATCNCSIHVSK

SEQ ID NO: 1994 - protein, 39 aa, Artificial
  Peptide with targeting and/or antimicrobial activity
GWLKKLGKRIERIGQHTRDATIQGLGIAQQAANVAATAR

SEQ ID NO: 1995 - protein, 33 aa, Artificial
  Peptide with targeting and/or antimicrobial activity
GLWSKIKEVGKEAAKAAAKAAGKAALGAVSEAV

SEQ ID NO: 1996 - protein, 34 aa, Artificial
  Peptide with targeting and/or antimicrobial activity
LTCEIDRSLCLLHCRLKGYLRAYCSQQKVCRCVQ

SEQ ID NO: 1997 - protein, 40 aa, Artificial
  Peptide with targeting and/or antimicrobial activity
ATCDLLSGIGVQHSACALHCVFRGNRGGYCTGKGICVCRN

SEQ ID NO: 1998 - protein, 16 aa, Artificial
  Peptide with targeting and/or antimicrobial activity
RGGRLCYCRRRFCICV

SEQ ID NO: 1999 - protein, 18 aa, Artificial
  Peptide with targeting and/or antimicrobial activity
RGGGLCYCRRRFCVCVGR

SEQ ID NO: 2000 - protein, 24 aa, Artificial
  Peptide with targeting and/or antimicrobial activity
FLPLLAGLAANFLPKIFCKITRKC

SEQ ID NO: 2001 - protein, 46 aa, Artificial
  Peptide with targeting and/or antimicrobial activity
GIFSKLGRKKIKNLLISGLKNVGKEVGMDVVRTGIDIAGCKIKGEC

SEQ ID NO: 2002 - protein, 24 aa, Artificial
  Peptide with targeting and/or antimicrobial activity
FLPVLAGIAAKVVPALFCKITKKC

SEQ ID NO: 2003 - protein, 33 aa, Artificial
  Peptide with targeting and/or antimicrobial activity
GLLDSLKGFAATAGKGVLQSLLSTASCKLAKTC

SEQ ID NO: 2004 - protein, 38 aa, Artificial
  Peptide with targeting and/or antimicrobial activity
DSHEERHHGRHGHHKYGRKFHEKHHSHRGYRSNYLYDN

SEQ ID NO: 2005 - protein, 18 aa, Artificial
  Peptide with targeting and/or antimicrobial activity
GNNRPVYIPQPRPPHPRI

SEQ ID NO: 2006 - protein, 18 aa, Artificial
  Peptide with targeting and/or antimicrobial activity
GNNRPVYIPQPRPPHPRL

SEQ ID NO: 2007 - protein, 29 aa, Artificial
  Peptide with targeting and/or antimicrobial activity
SIGSALKKALPVAKKIGKIALPIAKAALP

SEQ ID NO: 2008 - protein, 29 aa, Artificial
  Peptide with targeting and/or antimicrobial activity
SIGSAFKKALPVAKKIGKAALPIAKAALP

SEQ ID NO: 2009 - protein, 19 aa, Artificial
  Peptide with targeting and/or antimicrobial activity
GKPRPYSPRPTSHPRPIRV

SEQ ID NO: 2010 - protein, 20 aa, Artificial
  Peptide with targeting and/or antimicrobial activity
VDKGSYLPRPTPPRPIYNRN

SEQ ID NO: 2011 - protein, 37 aa, Artificial
  Peptide with targeting and/or antimicrobial activity
KYYGNGVHCTKSGCSVNWGEAASAGIHRLANGGNGFW

SEQ ID NO: 2012 - protein, 43 aa, Artificial
  Peptide with targeting and/or antimicrobial activity
AISYGNGVYCNKEKCWVNKAENKQAITGIVIGGWASSLAGMGH

SEQ ID NO: 2013 - protein, 24 aa, Artificial
  Peptide with targeting and/or antimicrobial activity
GVLSNVIGYLKKLGTGALNAVLKQ

SEQ ID NO: 2014 - protein, 20 aa, Artificial
  Peptide with targeting and/or antimicrobial activity
FLGGLIKIVPAMICAVTKKC

SEQ ID NO: 2015 - protein, 24 aa, Artificial
  Peptide with targeting and/or antimicrobial activity
FLPAIFRMAAKVVPTIICSITKKC

SEQ ID NO: 2016 - protein, 23 aa, Artificial
  Peptide with targeting and/or antimicrobial activity
VIPFVASVAAEMQHVYCAASRKC

SEQ ID NO: 2017 - protein, 33 aa, Artificial
  Peptide with targeting and/or antimicrobial activity
GILDTLKNLAISAAKGAAQGLVNKASCKLSGQC

SEQ ID NO: 2018 - protein, 33 aa, Artificial
  Peptide with targeting and/or antimicrobial activity
GILDTLKNLAKTAGKGALQGLVKMASCKLSGQC

SEQ ID NO: 2019 - protein, 34 aa, Artificial
  Peptide with targeting and/or antimicrobial activity
GILLDKLKNFAKTAGKGVLQSLLNTASCKLSGQC

SEQ ID NO: 2020 - protein, 29 aa, Artificial
  Peptide with targeting and/or antimicrobial activity
GILDSLKNLAKNAGQILLNKASCKLSGQC

SEQ ID NO: 2021 - protein, 46 aa, Artificial
  Peptide with targeting and/or antimicrobial activity
GIFSKLAGKKIKNLLISGLKNVGKEVGMDVVRTGIDIAGCKIKGEC

SEQ ID NO: 2022 - protein, 46 aa, Artificial
  Peptide with targeting and/or antimicrobial activity
GIFSKLAGKKLKNLLISGLKNVGKEVGMDVVRTGIDIAGCKIKGEC

SEQ ID NO: 2023 - protein, 37 aa, Artificial
  Peptide with targeting and/or antimicrobial activity
GILSLVKGVAKLAGKGLAKEGGKFGLELIACKIAKQC

SEQ ID NO: 2024 - protein, 37 aa, Artificial
  Peptide with targeting and/or antimicrobial activity
GIFSLVKGAAKLAGKGLAKEGGKFGLELIACKIAKQC

SEQ ID NO: 2025 - protein, 39 aa, Artificial
  Peptide with targeting and/or antimicrobial activity
GRKSDCFRKSGFCAFLKCPSLTLISGKCSRFYLCCKRIW

SEQ ID NO: 2026 - protein, 39 aa, Artificial
  Peptide with targeting and/or antimicrobial activity
GRKSDCFRKNGFCAFLKCPYLTLISGKCSRFHLCCKRIW

SEQ ID NO: 2027 - protein, 36 aa, Artificial
  Peptide with targeting and/or antimicrobial activity
LFCKGGSCHFGGCPSHLIKVGSCFGFRSCCKWPWNA

SEQ ID NO: 2028 - protein, 40 aa, Artificial
  Peptide with targeting and/or antimicrobial activity
VRNHVTCRINRGFCVPIRCPGRTRQIGTCFGPRIKCCRSW

SEQ ID NO: 2029 - protein, 42 aa, Artificial
  Peptide with targeting and/or antimicrobial activity
QGVRNHVTCRINRGFCVPIRCPGRTRQIGTCFGPRIKCCRSW

SEQ ID NO: 2030 - protein, 41 aa, Artificial
  Peptide with targeting and/or antimicrobial activity
QRVRNPQSCRWNMGVCIPFLCRVGMRQIGTCFGPRVPCCRR

SEQ ID NO: 2031 - protein, 42 aa, Artificial
  Peptide with targeting and/or antimicrobial activity
QVVRNPQSCRWNMGVCIPISCPGNMRQIGTCFGPRVPCCRRW

SEQ ID NO: 2032 - protein, 42 aa, Artificial
  Peptide with targeting and/or antimicrobial activity
QGVRNHVTCRIYGGFCVPIRCPGRTRQIGTCFGRPVKCCRRW

SEQ ID NO: 2033 - protein, 40 aa, Artificial
  Peptide with targeting and/or antimicrobial activity
QGVRNFVTCRINRGFCVPIRCPGHRRQIGTCLGPRIKCCR

SEQ ID NO: 2034 - protein, 38 aa, Artificial
  Peptide with targeting and/or antimicrobial activity
VRNFVTCRINRGFCVPIRCPGHRRQIGTCLGPQIKCCR

SEQ ID NO: 2035 - protein, 40 aa, Artificial
  Peptide with targeting and/or antimicrobial activity
QGVRNFVTCRINRGFCVPIRCPGHRRQIGTCLAPQIKCCR

SEQ ID NO: 2036 - protein, 40 aa, Artificial
  Peptide with targeting and/or antimicrobial activity
QGVRSYLSCWGNRGICLLNRCPGRMRQIGTCLAPRVKCCR

SEQ ID NO: 2037 - protein, 38 aa, Artificial
  Peptide with targeting and/or antimicrobial activity
GPLSCRRNGGVCIPIRCPGPMRQIGTCFGRPVKCCRSW

SEQ ID NO: 2038 - protein, 42 aa, Artificial
  Peptide with targeting and/or antimicrobial activity
SGISGPLSCGRNGGVCIPIRCPVPMRQIGTCFGRPVKCCRSW

SEQ ID NO: 2039 - protein, 37 aa, Artificial
  Peptide with targeting and/or antimicrobial activity
PWNIFKEIERAVARTRDAVISAGPAVRTVAAATSVAS

SEQ ID NO: 2040 - protein, 30 aa, Artificial
  Peptide with targeting and/or antimicrobial activity
RCICTTRTCRFPYRRLGTCLFQNRVYTFCC

SEQ ID NO: 2041 - protein, 23 aa, Artificial
  Peptide with targeting and/or antimicrobial activity
RIIDLLWRVRRPQKPKFVTVWVR

SEQ ID NO: 2042 - protein, 37 aa, Artificial
  Peptide with targeting and/or antimicrobial activity
VGRFRRLRKKTRKRLKKIGKVLKWIPPIVGSIPLGCG

SEQ ID NO: 2043 - protein, 37 aa, Artificial
  Peptide with targeting and/or antimicrobial activity
GLLSRLRDFLSDRGRRLGEKIERIGQKIKDLSEFFQS

SEQ ID NO: 2044 - protein, 18 aa, Artificial
  Peptide with targeting and/or antimicrobial activity
RGGRLCYCRGWICFCVGR

SEQ ID NO: 2045 - protein, 18 aa, Artificial
  Peptide with targeting and/or antimicrobial activity
RGGRLCYCRPRFCVCVGR

SEQ ID NO: 2046 - protein, 35 aa, Artificial
  Peptide with targeting and/or antimicrobial activity
RWKIFKKIERVGQNVRDGIIKAGPAIQVLGTAKAL

SEQ ID NO: 2047 - protein, 35 aa, Artificial
  Peptide with targeting and/or antimicrobial activity
RWKFFKKIERVGQNVRDGLIKAGPAIQVLGAAKAL

SEQ ID NO: 2048 - protein, 35 aa, Artificial
  Peptide with targeting and/or antimicrobial activity
RWKVFKKIEKVGRNIRDGVIKAGPAIAVVGQAKAL

SEQ ID NO: 2049 - protein, 35 aa, Artificial
  Peptide with targeting and/or antimicrobial activity
RWKVFKKIEKVGRHIRDGVIKAGPAITVVGQATAL

SEQ ID NO: 2050 - protein, 34 aa, Artificial
  Peptide with targeting and/or antimicrobial activity
GLLRKGGEKIGEKLKKIGQKIKNFFQKLVPQPEQ

SEQ ID NO: 2051 - protein, 27 aa, Artificial
  Peptide with targeting and/or antimicrobial activity
GRFKRFRKKFKKLFKKLSPVIPLLHLG

SEQ ID NO: 2052 - protein, 28 aa, Artificial
  Peptide with targeting and/or antimicrobial activity
GGLRSLGRKILRAWKKYGPIIVPIIRIG

SEQ ID NO: 2053 - protein, 12 aa, Artificial
  Peptide with targeting and/or antimicrobial activity
RICRIIFLRVCR

SEQ ID NO: 2054 - protein, 32 aa, Artificial
  Peptide with targeting and/or antimicrobial activity
DLRFLYPRGKLPVPTPPPFNPKPIYIDMGNRY

SEQ ID NO: 2055 - protein, 32 aa, Artificial
  Peptide with targeting and/or antimicrobial activity
DLRFLYPRGKLPVPTLPPFNPKPIYIDMGNRY

SEQ ID NO: 2056 - protein, 39 aa, Artificial
  Peptide with targeting and/or antimicrobial activity
AGRGKQGGKVRAKAKTRSSRAGLQFPVGRVHRLLRKGNY

SEQ ID NO: 2057 - protein, 21 aa, Artificial
  Peptide with targeting and/or antimicrobial activity
TRSSRAGLQFPVGRVHRLLRK

SEQ ID NO: 2058 - protein, 25 aa, Artificial
  Peptide with targeting and/or antimicrobial activity
GLLSVLGSVAKHVLPHVVPVIAEHL

SEQ ID NO: 2059 - protein, 25 aa, Artificial
  Peptide with targeting and/or antimicrobial activity
GLLGVLGSVAKHVLPHVVPVIAEHL

SEQ ID NO: 2060 - protein, 25 aa, Artificial
  Peptide with targeting and/or antimicrobial activity
GLLSVLGSVAQHVLPHVVPVIAEHL

SEQ ID NO: 2061 - protein, 25 aa, Artificial
  Peptide with targeting and/or antimicrobial activity
GLLSSLSSVAKHVLPHVVPVIAEHL

SEQ ID NO: 2062 - protein, 25 aa, Artificial
  Peptide with targeting and/or antimicrobial activity
GLLSVLGSVVKHVIPHVVPVIAEHL

SEQ ID NO: 2063 - protein, 24 aa, Artificial
  Peptide with targeting and/or antimicrobial activity
GLFSVLGAVAKHVLPHVVPVIAEK

SEQ ID NO: 2064 - protein, 24 aa, Artificial
  Peptide with targeting and/or antimicrobial activity
GLFKVLGSVAKHLLPHVAPVIAEK

SEQ ID NO: 2065 - protein, 25 aa, Artificial
  Peptide with targeting and/or antimicrobial activity
GLVSSIGRALGGLLADVVKSKGQPA

SEQ ID NO: 2066 - protein, 25 aa, Artificial
  Peptide with targeting and/or antimicrobial activity
GLVSSIGRALGGLLADVVKSKEQPA

SEQ ID NO: 2067 - protein, 25 aa, Artificial
  Peptide with targeting and/or antimicrobial activity
GLVSSIGKALGGLLADVVKTKEQPA

SEQ ID NO: 2068 - protein, 25 aa, Artificial
  Peptide with targeting and/or antimicrobial activity
GLVSSIGRALGGLLADVVKSKEQPA

SEQ ID NO: 2069 - protein, 22 aa, Artificial
  Peptide with targeting and/or antimicrobial activity
GLWQKIKDKASELVSGIVEGVK

SEQ ID NO: 2070 - protein, 22 aa, Artificial
  Peptide with targeting and/or antimicrobial activity
GLWEKIKEKASELVSGIVEGVK

SEQ ID NO: 2071 - protein, 22 aa, Artificial
  Peptide with targeting and/or antimicrobial activity
GLWEKIKEKANELVSGIVEGVK

SEQ ID NO: 2072 - protein, 22 aa, Artificial
  Peptide with targeting and/or antimicrobial activity
GLWEKIREKANELVSGIVEGVK

SEQ ID NO: 2073 - protein, 23 aa, Artificial
  Peptide with targeting and/or antimicrobial activity
GLWQKIKSAAGDLASGIVEGIKS

SEQ ID NO: 2074 - protein, 23 aa, Artificial
  Peptide with targeting and/or antimicrobial activity
GLWQKIKSAAGDLASGIVEAIKS

SEQ ID NO: 2075 - protein, 23 aa, Artificial
  Peptide with targeting and/or antimicrobial activity
GLWQKIKNAAGDLASGIVEGIKS

SEQ ID NO: 2076 - protein, 20 aa, Artificial
  Peptide with targeting and/or antimicrobial activity
GLMSVLGHAVGNVLGGLFKS

SEQ ID NO: 2077 - protein, 37 aa, Artificial
  Peptide with targeting and/or antimicrobial activity
DQYKCLQHGGFCLRSSCPSNTKLQGTCKPDKPNCCKS

SEQ ID NO: 2078 - protein, 34 aa, Artificial
  Peptide with targeting and/or antimicrobial activity
GLFRRLRDSIRRGQQKILEKARRIGERIKDIFRG

SEQ ID NO: 2079 - protein, 34 aa, Artificial
  Peptide with targeting and/or antimicrobial activity
SIVPIRCRSNRDCRRFCGFRGGRCTYARQCLCGY

SEQ ID NO: 2080 - protein, 31 aa, Artificial
  Peptide with targeting and/or antimicrobial activity
SIPCGESCVFIPCTVTALLGCSCKSKVCYKN

SEQ ID NO: 2081 - protein, 13 aa, Artificial
  Peptide with targeting and/or antimicrobial activity
FLPLIGRVLSGIL

SEQ ID NO: 2082 - protein, 13 aa, Artificial
  Peptide with targeting and/or antimicrobial activity
LLPILGNLLNGLL

SEQ ID NO: 2083 - protein, 13 aa, Artificial
  Peptide with targeting and/or antimicrobial activity
VLPIIGNLLNSLL

SEQ ID NO: 2084 - protein, 13 aa, Artificial
  Peptide with targeting and/or antimicrobial activity
FLPLIGKVLSGIL

SEQ ID NO: 2085 - protein, 10 aa, Artificial
  Peptide with targeting and/or antimicrobial activity
LLPNLLKSLL

SEQ ID NO: 2086 - protein, 46 aa, Artificial
  Peptide with targeting and/or antimicrobial activity
EVERKHPLGGSRPGRCPTVPPGTFGHCACLCTGDASEPKGQKCCSN

SEQ ID NO: 2087 - protein, 13 aa, Artificial
  Peptide with targeting and/or antimicrobial activity
FVQWFSKFLGRIL

SEQ ID NO: 2088 - protein, 13 aa, Artificial
  Peptide with targeting and/or antimicrobial activity
LLPIVGNLLKSLL

SEQ ID NO: 2089 - protein, 13 aa, Artificial
  Peptide with targeting and/or antimicrobial activity
FFPVIGRILNGIL

SEQ ID NO: 2090 - protein, 74 aa, Artificial
  Peptide with targeting and/or antimicrobial activity
SLQGGAPNFPQPSQQNGGWQVSPDLGRDDKGNTRGQIEIQNKGKDHDFNAGWGKVIRGPNKAKPTWHVGGTYRR

SEQ ID NO: 2091 - protein, 39 aa, Artificial
  Peptide with targeting and/or antimicrobial activity
RRRPRPPYLPRPRPPPFFPPRLPPRIPPGFPPRFPPRFP

SEQ ID NO: 2092 - protein, 38 aa, Artificial
  Peptide with targeting and/or antimicrobial activity
GFGCPLDQMQCHRHCQTITGRSGGYCSGPLKLTCTCYR

SEQ ID NO: 2093 - protein, 34 aa, Artificial
  Peptide with targeting and/or antimicrobial activity
GICACRRRFCLNFEQFSGYCRVNGARYVRCCSRR

SEQ ID NO: 2094 - protein, 32 aa, Artificial
  Peptide with targeting and/or antimicrobial activity
RADTQTYQPYNKDWIKEKIYVLLRRQAQQAGK

SEQ ID NO: 2095 - protein, 34 aa, Artificial
  Peptide with targeting and/or antimicrobial activity
ALWKTMLKKLGTMALHAGKAALGAAADTISQGTQ

SEQ ID NO: 2096 - protein, 34 aa, Artificial
  Peptide with targeting and/or antimicrobial activity
ALWFTMLKKLGTMALHAGKAALGAAANTISQGTQ

SEQ ID NO: 2097 - protein, 30 aa, Artificial
  Peptide with targeting and/or antimicrobial activity
ALWKNMLKGIGKLAGKAALGAVKKLVGAES

SEQ ID NO: 2098 - protein, 27 aa, Artificial
  Peptide with targeting and/or antimicrobial activity
ALWMTLLKKVLKAAAKALNAVLVGANA

SEQ ID NO: 2099 - protein, 29 aa, Artificial
  Peptide with targeting and/or antimicrobial activity
GLWSKIKTAGKSVAKAAAKAAVKAVTNAV

SEQ ID NO: 2100 - protein, 31 aa, Artificial
  Peptide with targeting and/or antimicrobial activity
AMWKDVLKKIGTVALHAGKAALGAVADTISQ

SEQ ID NO: 2101 - protein, 39 aa, Artificial
  Peptide with targeting and/or antimicrobial activity
GRKSDCFRKSGFCAFLKCPSLTLISGKCSRFYLCCKRIR

SEQ ID NO: 2102 - protein, 33 aa, Artificial
  Peptide with targeting and/or antimicrobial activity
GRKSDCFRKNGFCAFLKCPYLTLISGLCSFHLC

SEQ ID NO: 2103 - protein, 35 aa, Artificial
  Peptide with targeting and/or antimicrobial activity
GKREKCLRRNGFCAFLKCPTLSVISGTCSRFQVCC

SEQ ID NO: 2104 - protein, 36 aa, Artificial
  Peptide with targeting and/or antimicrobial activity
LFCKRGTCHFGRCPSHLIKVGSCFGFRSCCKWPWDA

SEQ ID NO: 2105 - protein, 25 aa, Artificial
  Peptide with targeting and/or antimicrobial activity
LSCKRGTCHFGRCPSHLIKGSCSGG

SEQ ID NO: 2106 - protein, 33 aa, Artificial
  Peptide with targeting and/or antimicrobial activity
SLFSLIKAGAKFLGKNLLKQGACYAACKASKQC

SEQ ID NO: 2107 - protein, 33 aa, Artificial
  Peptide with targeting and/or antimicrobial activity
GIMSIVKDVAKNAAKEAAKGALSTLSCKLAKTC

SEQ ID NO: 2108 - protein, 33 aa, Artificial
  Peptide with targeting and/or antimicrobial activity
GIMSIVKDVAKTAAKEAAKGALSTLSCKLAKTC

SEQ ID NO: 2109 - protein, 24 aa, Artificial
  Peptide with targeting and/or antimicrobial activity
FLGALFKVASKVLPSVFCAITKKC

SEQ ID NO: 2110 - protein, 24 aa, Artificial
  Peptide with targeting and/or antimicrobial activity
FLPLLAGLAANFLPTIICKISYKC

SEQ ID NO: 2111 - protein, 15 aa, Artificial
  Peptide with targeting and/or antimicrobial activity
VDKPDYRPRPRPPNM

SEQ ID NO: 2112 - protein, 15 aa, Artificial
  Peptide with targeting and/or antimicrobial activity
VDKPDYRPRPWPRPN

SEQ ID NO: 2113 - protein, 16 aa, Artificial
  Peptide with targeting and/or antimicrobial activity
VDKPDYRPRPWPRNMI

SEQ ID NO: 2114 - protein, 16 aa, Artificial
  Peptide with targeting and/or antimicrobial activity
VDKPDYRPRPWPRPNM

SEQ ID NO: 2115 - protein, 44 aa, Artificial
  Peptide with targeting and/or antimicrobial activity
KYYGNGVSCNKNGCTVDWSKAIGIIGNNAAANLTTGGAAGWNKG

SEQ ID NO: 2116 - protein, 22 aa, Artificial
  Peptide with targeting and/or antimicrobial activity
FKSWSFCTPGCAKTGSFNSYCC

SEQ ID NO: 2117 - protein, 23 aa, Artificial
  Peptide with targeting and/or antimicrobial activity
VFQFLGKIIHHVGNFVHGFSHVF

SEQ ID NO: 2118 - protein, 23 aa, Artificial
  Peptide with targeting and/or antimicrobial activity
VFQFLGRIIHHVGNFVHGFSHVF

SEQ ID NO: 2119 - protein, 23 aa, Artificial
  Peptide with targeting and/or antimicrobial activity
VFHLLGKIIHHVGNFVYGFSHVF

SEQ ID NO: 2120 - protein, 23 aa, Artificial
  Peptide with targeting and/or antimicrobial activity
AFKLLGRIIHHVGNFVYGFSHVF

SEQ ID NO: 2121 - protein, 23 aa, Artificial
  Peptide with targeting and/or antimicrobial activity
LFKLLGKIIHHVGNFVHGFSHVF

SEQ ID NO: 2122 - protein, 44 aa, Artificial
  Peptide with targeting and/or antimicrobial activity
DVQCGEGHFCHDQTCCRASQGGACCPYSQGVCCADQRHCCPVGF

SEQ ID NO: 2123 - protein, 36 aa, Artificial
  Peptide with targeting and/or antimicrobial activity
YPPKPESPGEDASPEEMNKYLTALRHYINLVTRQRY

SEQ ID NO: 2124 - protein, 33 aa, Artificial
  Peptide with targeting and/or antimicrobial activity
GLLNTFKDWAISIAKGAGKGVLTTLSCKLDKSC

SEQ ID NO: 2125 - protein, 33 aa, Artificial
  Peptide with targeting and/or antimicrobial activity
SLFSLIKAGAKFLGKNLLKQGAQYAACKVSKEC

SEQ ID NO: 2126 - protein, 37 aa, Artificial
  Peptide with targeting and/or antimicrobial activity
GILDSFKQFAKGVGKDLIKGAAQGVLSTMSCKLAKTC

SEQ ID NO: 2127 - protein, 50 aa, Artificial
  Peptide with targeting and/or antimicrobial activity
YRGGYTGPIPRPPPIGRPPLRLVVCACYRLSVSDARNCCIKFGSCCHLVK

SEQ ID NO: 2128 - protein, 50 aa, Artificial
  Peptide with targeting and/or antimicrobial activity
YRGGYTGPIPRPPPIGRPPFRPVCNACYRLSVSDARNCCIKFGSCCHLVK

SEQ ID NO: 2129 - protein, 62 aa, Artificial
  Peptide with targeting and/or antimicrobial activity
QVYKGGYTRPIPRPPPFVRPLPGGPIGPYNGCPVSCRGISFSQARSCCSRLGRCCHVGKGYS

SEQ ID NO: 2130 - protein, 24 aa, Artificial
  Peptide with targeting and/or antimicrobial activity
GLFKVLGSVAKHLLPHVVPVIAEK

SEQ ID NO: 2131 - protein, 24 aa, Artificial
  Peptide with targeting and/or antimicrobial activity
GLFGVLGSIAKHVLPHVVPVIAEK

SEQ ID NO: 2132 - protein, 35 aa, Artificial
  Peptide with targeting and/or antimicrobial activity
GGLKKLGKKLEGVGKRVFKASEKALPVAVGIKALG

SEQ ID NO: 2133 - protein, 16 aa, Artificial
  Peptide with targeting and/or antimicrobial activity
GRPNPVNTKPTPYPRL

SEQ ID NO: 2134 - protein, 16 aa, Artificial
  Peptide with targeting and/or antimicrobial activity
GRPNPVNNKPTPHPRL

SEQ ID NO: 2135 - protein, 47 aa, Artificial
  Peptide with targeting and/or antimicrobial activity
LLGRCKVKSNRFHGPCLTDTHCSTVCRGEGYKGGDCHGLRRRCMCLC

SEQ ID NO: 2136 - protein, 47 aa, Artificial
  Peptide with targeting and/or antimicrobial activity
LLGRCKVKSNRFNGPCLTDTHCSTVCRGEGYKGGDCHGLRRRCMCLC

SEQ ID NO: 2137 - protein, 39 aa, Artificial
  Peptide with targeting and/or antimicrobial activity
FVPYNPPRPYQSKPFPSFPGHGPFNPKIQWPYPLPNPGH

SEQ ID NO: 2138 - protein, 17 aa, Artificial
  Peptide with targeting and/or antimicrobial activity
GNRPVYIPPPRPPHPRL

SEQ ID NO: 2139 - protein, 33 aa, Artificial
  Peptide with targeting and/or antimicrobial activity
VTCFCRRRGCASRERHIGYCRFGNTIYRLCCRR

SEQ ID NO: 2140 - protein, 31 aa, Artificial
  Peptide with targeting and/or antimicrobial activity
CFCKRPVCDSGETQIGYCRLGNTFYRLCCRQ

SEQ ID NO: 2141 - protein, 33 aa, Artificial
  Peptide with targeting and/or antimicrobial activity
VTCFCRRRGCASRERLIGYCRFGNTIYGLCCRR

SEQ ID NO: 2142 - protein, 33 aa, Artificial
  Peptide with targeting and/or antimicrobial activity
VTCFCKRPVCDSGETQIGYCRLGNTFYRLCCRQ

SEQ ID NO: 2143 - protein, 19 aa, Artificial
  Peptide with targeting and/or antimicrobial activity
GFGKAFHSVSNFAKKHKTA

SEQ ID NO: 2144 - protein, 19 aa, Artificial
  Peptide with targeting and/or antimicrobial activity
GFGPAFHSVSNFAKKHKTA

SEQ ID NO: 2145 - protein, 21 aa, Artificial
  Peptide with targeting and/or antimicrobial activity
RQRVEELSKFSKKGAAARRRK

SEQ ID NO: 2146 - protein, 29 aa, Artificial
  Peptide with targeting and/or antimicrobial activity
ALWKNMLKGIGKLAGQAALGAVKTLVGAE

SEQ ID NO: 2147 - protein, 28 aa, Artificial
  Peptide with targeting and/or antimicrobial activity
ALWKDILKNVGKAAGKAVLNTVTDMVNQ

SEQ ID NO: 2148 - protein, 26 aa, Artificial
  Peptide with targeting and/or antimicrobial activity
GLWNKIKEAASKAAGKAALGFVNEMV

SEQ ID NO: 2149 - protein, 30 aa, Artificial
  Peptide with targeting and/or antimicrobial activity
ALWKTIIKGAGKMIGSLAKNLLGSQAQPES

SEQ ID NO: 2150 - protein, 19 aa, Artificial
  Peptide with targeting and/or antimicrobial activity
GWMSKIASGIGTFLSGMQQ

SEQ ID NO: 2151 - protein, 24 aa, Artificial
  Peptide with targeting and/or antimicrobial activity
MFFSSKKCKTVSKTFRGPCVRNAN

SEQ ID NO: 2152 - protein, 23 aa, Artificial
  Peptide with targeting and/or antimicrobial activity
MFFSSKKCKTVSKTFRGPCVRNA

SEQ ID NO: 2153 - protein, 25 aa, Artificial
  Peptide with targeting and/or antimicrobial activity
GIFSSRKCKTVSKTFRGICTRNANC

SEQ ID NO: 2154 - protein, 21 aa, Artificial
  Peptide with targeting and/or antimicrobial activity
TCESPSHKFKGPCATNRNCES

SEQ ID NO: 2155 - protein, 38 aa, Artificial
  Peptide with targeting and/or antimicrobial activity
GIFSSRKCKTPSKTFKGYCTRDSNCDTSCRYEGYPAGD

SEQ ID NO: 2156 - protein, 41 aa, Artificial
  Peptide with targeting and/or antimicrobial activity
QQCGRQASGRLCGNRLCCSQWGYCGSTASYCGAGCQSQCRS

SEQ ID NO: 2157 - protein, 71 aa, Artificial
  Peptide with targeting and/or antimicrobial activity
SLQPGAPNVNNKDQPWQVSPHISRDDSGNTRTDINVQRHGENNDFEAGWSKVVRGPNKAKPTWHIGGTHRW

SEQ ID NO: 2158 - protein, 47 aa, Artificial
  Peptide with targeting and/or antimicrobial activity
SSLLEKGLDGAKKAVGGLGKLGKDAVEDLESVGKGAVHDVKDVLDSV

SEQ ID NO: 2159 - protein, 34 aa, Artificial
  Peptide with targeting and/or antimicrobial activity
GCASRCKAKCAGRRCKGWASASFRGRCYCKCFRC

SEQ ID NO: 2160 - protein, 34 aa, Artificial
  Peptide with targeting and/or antimicrobial activity
SCASRCKGHCRARRCGYYVSVLYRGRCYCKCLRC

SEQ ID NO: 2161 - protein, 22 aa, Artificial
  Peptide with targeting and/or antimicrobial activity
FFHHIFRGIVHVGKTIHKLVTG

SEQ ID NO: 2162 - protein, 16 aa, Artificial
  Peptide with targeting and/or antimicrobial activity
GLFDVIKKVASVIGGL

SEQ ID NO: 2163 - protein, 16 aa, Artificial
  Peptide with targeting and/or antimicrobial activity
GLFDIIKKVASVVGGL

SEQ ID NO: 2164 - protein, 16 aa, Artificial
  Peptide with targeting and/or antimicrobial activity
GLFDIIKKVASVIGGL

SEQ ID NO: 2165 - protein, 19 aa, Artificial
  Peptide with targeting and/or antimicrobial activity
PDPAKTAPKKGSKKAVTKA

SEQ ID NO: 2166 - protein, 43 aa, Artificial
  Peptide with targeting and/or antimicrobial activity
RFRPPIRRPPIRPPFNPPFRPPVRPPFRPPFRPPFRPPIGPFP

SEQ ID NO: 2167 - protein, 19 aa, Artificial
  Peptide with targeting and/or antimicrobial activity
GIVDFAKKVVGGIRNALGI

SEQ ID NO: 2168 - protein, 19 aa, Artificial
  Peptide with targeting and/or antimicrobial activity
GFVDLAKKVVGGIRNALGI

SEQ ID NO: 2169 - protein, 19 aa, Artificial
  Peptide with targeting and/or antimicrobial activity
GFFDLAKKVVGGIRNALGI

SEQ ID NO: 2170 - protein, 19 aa, Artificial
  Peptide with targeting and/or antimicrobial activity
GILDFAKTVVGGIRNALGI

SEQ ID NO: 2171 - protein, 19 aa, Artificial
  Peptide with targeting and/or antimicrobial activity
GIVDFAKGVLGKIKNVLGI

SEQ ID NO: 2172 - protein, 17 aa, Artificial
  Peptide with targeting and/or antimicrobial activity
GVLDAFRKIATVVKNVV

SEQ ID NO: 2173 - protein, 17 aa, Artificial
  Peptide with targeting and/or antimicrobial activity
GVGSFIHKVVSAIKNVA

SEQ ID NO: 2174 - protein, 19 aa, Artificial
  Peptide with targeting and/or antimicrobial activity
GIIDIAKKLVGGIRNVLGI

SEQ ID NO: 2175 - protein, 19 aa, Artificial
  Peptide with targeting and/or antimicrobial activity
GILDVAKTLVGKLRNVLGI

SEQ ID NO: 2176 - protein, 17 aa, Artificial
  Peptide with targeting and/or antimicrobial activity
GVGDLIRKAVSVIKNIV

SEQ ID NO: 2177 - protein, 17 aa, Artificial
  Peptide with targeting and/or antimicrobial activity
GVIDAAKKVVNVLKNLP

SEQ ID NO: 2178 - protein, 13 aa, Artificial
  Peptide with targeting and/or antimicrobial activity
GWFDVVKHIASAV

SEQ ID NO: 2179 - protein, 22 aa, Artificial
  Peptide with targeting and/or antimicrobial activity
GLFVGVLAKVAAHVVPAIAEHF

SEQ ID NO: 2180 - protein, 23 aa, Artificial
  Peptide with targeting and/or antimicrobial activity
GLFVGLAKVAAHNNPAIAEHFQA

SEQ ID NO: 2181 - protein, 18 aa, Artificial
  Peptide with targeting and/or antimicrobial activity
GFVDFLKKVAGTIANVVT

SEQ ID NO: 2182 - protein, 26 aa, Artificial
  Peptide with targeting and/or antimicrobial activity
GLLQTIKEKLESLESLAKGIVSGIQA

SEQ ID NO: 2183 - protein, 25 aa, Artificial
  Peptide with targeting and/or antimicrobial activity
GLLSVLGSVAKHVLPHVVPVIAEKL

SEQ ID NO: 2184 - protein, 20 aa, Artificial
  Peptide with targeting and/or antimicrobial activity
VNPIILGVLPKFVCLITKKC

SEQ ID NO: 2185 - protein, 17 aa, Artificial
  Peptide with targeting and/or antimicrobial activity
FITLLLRKFICSITKKC

SEQ ID NO: 2186 - protein, 29 aa, Artificial
  Peptide with targeting and/or antimicrobial activity
GLWETIKNFGKKFTLNILHKLKCKIGGGC

SEQ ID NO: 2187 - protein, 29 aa, Artificial
  Peptide with targeting and/or antimicrobial activity
GLWETIKNFGKKFTLNILHNLKCKIGGGC

SEQ ID NO: 2188 - protein, 13 aa, Artificial
  Peptide with targeting and/or antimicrobial activity
SGFVLKGYTKTSQ

SEQ ID NO: 2189 - protein, 13 aa, Artificial
  Peptide with targeting and/or antimicrobial activity
AGFVLKGYTKTSQ

SEQ ID NO: 2190 - protein, 20 aa, Artificial
  Peptide with targeting and/or antimicrobial activity
IIGPVLGMVGSALGGLLKKI

SEQ ID NO: 2191 - protein, 20 aa, Artificial
  Peptide with targeting and/or antimicrobial activity
LIGPVLGLVGSALGGLLKKI

SEQ ID NO: 2192 - protein, 20 aa, Artificial
  Peptide with targeting and/or antimicrobial activity
IIGPVLGLVGSALGGLLKKI

SEQ ID NO: 2193 - protein, 27 aa, Artificial
  Peptide with targeting and/or antimicrobial activity
GIGASILSAGKSALKGFAKGLAEHFAN

SEQ ID NO: 2194 - protein, 35 aa, Artificial
  Peptide with targeting and/or antimicrobial activity
LRDLVCYCRTRGCKRRERMNGTCRKGHLMYTLCCR

SEQ ID NO: 2195 - protein, 30 aa, Artificial
  Peptide with targeting and/or antimicrobial activity
ACYCRIPACLAGERRYGTCFYMGRVWAFCC

SEQ ID NO: 2196 - protein, 13 aa, Artificial
  Peptide with targeting and/or antimicrobial activity
GLFDIIKKIAESI

SEQ ID NO: 2197 - protein, 16 aa, Artificial
  Peptide with targeting and/or antimicrobial activity
GLLDIVKKVVGAFGSL

SEQ ID NO: 2198 - protein, 16 aa, Artificial
  Peptide with targeting and/or antimicrobial activity
GLFDIVKKVVGALGSL

SEQ ID NO: 2199 - protein, 16 aa, Artificial
  Peptide with targeting and/or antimicrobial activity
GLFDIVKKVVGAIGSL

SEQ ID NO: 2200 - protein, 16 aa, Artificial
  Peptide with targeting and/or antimicrobial activity
GLFDIVKKVVGTIAGL

SEQ ID NO: 2201 - protein, 16 aa, Artificial
  Peptide with targeting and/or antimicrobial activity
GLFDIVKKVVGAFGSL

SEQ ID NO: 2202 - protein, 16 aa, Artificial
  Peptide with targeting and/or antimicrobial activity
GLFDIAKKVIGVIGSL

SEQ ID NO: 2203 - protein, 17 aa, Artificial
  Peptide with targeting and/or antimicrobial activity
GLFDIVKKIAGHIAGSI

SEQ ID NO: 2204 - protein, 17 aa, Artificial
  Peptide with targeting and/or antimicrobial activity
GLFDIVKKIAGHIASSI

SEQ ID NO: 2205 - protein, 17 aa, Artificial
  Peptide with targeting and/or antimicrobial activity
GLFDIVKKIAGHIVSSI

SEQ ID NO: 2206 - protein, 30 aa, Artificial
  Peptide with targeting and/or antimicrobial activity
GWKDWAKKAGGWLKKKGPGMAKAALKAAMQ

SEQ ID NO: 2207 - protein, 30 aa, Artificial
  Peptide with targeting and/or antimicrobial activity
GWKDWLKKGKEWLKAKGPGIVKAALQAATQ

SEQ ID NO: 2208 - protein, 30 aa, Artificial
  Peptide with targeting and/or antimicrobial activity
GWKDWLNKGKEWLKKKGPGIMKAALKAATQ

SEQ ID NO: 2209 - protein, 29 aa, Artificial
  Peptide with targeting and/or antimicrobial activity
DFKDWMKTAGEWLKKKGPGILKAAMAAAT

SEQ ID NO: 2210 - protein, 30 aa, Artificial
  Peptide with targeting and/or antimicrobial activity
GLKDWVKIAGGWLKKKGPGILKAAMAAATQ

SEQ ID NO: 2211 - protein, 18 aa, Artificial
  Peptide with targeting and/or antimicrobial activity
GLVDVLGKVGGLIKKLLP

SEQ ID NO: 2212 - protein, 19 aa, Artificial
  Peptide with targeting and/or antimicrobial activity
GLVDVLGKVGGLIKKLLPG

SEQ ID NO: 2213 - protein, 24 aa, Artificial
  Peptide with targeting and/or antimicrobial activity
LLKELWTKMKGAGKAVLGKIKGLL

SEQ ID NO: 2214 - protein, 24 aa, Artificial
  Peptide with targeting and/or antimicrobial activity
LLKELWTKIKGAGKAVLGKIKGLL

SEQ ID NO: 2215 - protein, 25 aa, Artificial
  Peptide with targeting and/or antimicrobial activity
WLGSALKIGAKLLPSVVGLFKKKKQ

SEQ ID NO: 2216 - protein, 25 aa, Artificial
  Peptide with targeting and/or antimicrobial activity
WLGSALKIGAKLLPSVVGLFQKKKK

SEQ ID NO: 2217 - protein, 26 aa, Artificial
  Peptide with targeting and/or antimicrobial activity
GIWGTLAKIGIKAVPRVISMLKKKKQ

SEQ ID NO: 2218 - protein, 26 aa, Artificial
  Peptide with targeting and/or antimicrobial activity
GIWGTALKWGVKLLPKLVGMAQTKKQ

SEQ ID NO: 2219 - protein, 24 aa, Artificial
  Peptide with targeting and/or antimicrobial activity
FWGALIKGAAKLIPSVVGLFKKKQ

SEQ ID NO: 2220 - protein, 20 aa, Artificial
  Peptide with targeting and/or antimicrobial activity
FIGTALGIASAIPAIVKLFK

SEQ ID NO: 2221 - protein, 11 aa, Artificial
  Peptide with targeting and/or antimicrobial activity
FCTMIPIPRCY

SEQ ID NO: 2222 - protein, 12 aa, Artificial
  Peptide with targeting and/or antimicrobial activity
RVCFAIPLPICH

SEQ ID NO: 2223 - protein, 12 aa, Artificial
  Peptide with targeting and/or antimicrobial activity
RVCYAIPLPICY

SEQ ID NO: 2224 - protein, 41 aa, Artificial
  Peptide with targeting and/or antimicrobial activity
GILDTIKSIASKVWNSKTVQDLKRKGINWVANKLGVSPQAA

SEQ ID NO: 2225 - protein, 33 aa, Artificial
  Peptide with targeting and/or antimicrobial activity
GLLSGLKKVGKHVAKNVAVSLMDSLKCKISGDC

SEQ ID NO: 2226 - protein, 25 aa, Artificial
  Peptide with targeting and/or antimicrobial activity
SMLSVLKNLGKVGLGFVACKINKQC

SEQ ID NO: 2227 - protein, 31 aa, Artificial
  Peptide with targeting and/or antimicrobial activity
GLFLDTLKGAAKDVAGKLEGLKCKITGCKLP

SEQ ID NO: 2228 - protein, 32 aa, Artificial
  Peptide with targeting and/or antimicrobial activity
GFLDIINKLGKTFAGHMLDKIKCTIGTCPPSP

SEQ ID NO: 2229 - protein, 24 aa, Artificial
  Peptide with targeting and/or antimicrobial activity
FLPFIARLAAKVFPSIICSVTKKC

SEQ ID NO: 2230 - protein, 13 aa, Artificial
  Peptide with targeting and/or antimicrobial activity
FISAIASMLGKFL

SEQ ID NO: 2231 - protein, 13 aa, Artificial
  Peptide with targeting and/or antimicrobial activity
FLSAIASMLGKFL

SEQ ID NO: 2232 - protein, 13 aa, Artificial
  Peptide with targeting and/or antimicrobial activity
FISAIASFLGKFL

SEQ ID NO: 2233 - protein, 14 aa, Artificial
  Peptide with targeting and/or antimicrobial activity
FLFPLITSFLSKVL

SEQ ID NO: 2234 - protein, 24 aa, Artificial
  Peptide with targeting and/or antimicrobial activity
FLPMLAGLAASMVPKLVCLITKKC

SEQ ID NO: 2235 - protein, 24 aa, Artificial
  Peptide with targeting and/or antimicrobial activity
FLPMLAGLAASMVPKFVCLITKKC

SEQ ID NO: 2236 - protein, 32 aa, Artificial
  Peptide with targeting and/or antimicrobial activity
GILDSFKGVAKGVAKDLAGKLLDKLKCKITGC

SEQ ID NO: 2237 - protein, 32 aa, Artificial
  Peptide with targeting and/or antimicrobial activity
GILSSIKGVAKGVAKNVAAQLLDTLKCKITGC

SEQ ID NO: 2238 - protein, 13 aa, Artificial
  Peptide with targeting and/or antimicrobial activity
VLPLISMALGKLL

SEQ ID NO: 2239 - protein, 14 aa, Artificial
  Peptide with targeting and/or antimicrobial activity
NFLGTLINLAKKIM

SEQ ID NO: 2240 - protein, 14 aa, Artificial
  Peptide with targeting and/or antimicrobial activity
FLPILINLIHKGLL

SEQ ID NO: 2241 - protein, 24 aa, Artificial
  Peptide with targeting and/or antimicrobial activity
FLPFIAGMAAKFLPKIFCAISKKC

SEQ ID NO: 2242 - protein, 24 aa, Artificial
  Peptide with targeting and/or antimicrobial activity
FLPAIAGMAAKFLPKIFCAISKKC

SEQ ID NO: 2243 - protein, 24 aa, Artificial
  Peptide with targeting and/or antimicrobial activity
FLPFIAGVAAKFLPKIFCAISKKC

SEQ ID NO: 2244 - protein, 24 aa, Artificial
  Peptide with targeting and/or antimicrobial activity
FLPAIAGVAAKFLPKIFCAISKKC

SEQ ID NO: 2245 - protein, 24 aa, Artificial
  Peptide with targeting and/or antimicrobial activity
FLPAIVGAAAKFLPKIFCVISKKC

SEQ ID NO: 2246 - protein, 24 aa, Artificial
  Peptide with targeting and/or antimicrobial activity
FLPFIAGMAANFLPKIFCAISKKC

SEQ ID NO: 2247 - protein, 28 aa, Artificial
  Peptide with targeting and/or antimicrobial activity
GLLDTIKGVAKTVAASMLDKLKCKISGC

SEQ ID NO: 2248 - protein, 24 aa, Artificial
  Peptide with targeting and/or antimicrobial activity
FLPIIAGVAAKVFPKIFCAISKKC

SEQ ID NO: 2249 - protein, 24 aa, Artificial
  Peptide with targeting and/or antimicrobial activity
FLPIIAGIAAKVFPKIFCAISKKC

SEQ ID NO: 2250 - protein, 24 aa, Artificial
  Peptide with targeting and/or antimicrobial activity
FLPIIASVAAKVFSKIFCAISKKC

SEQ ID NO: 2251 - protein, 24 aa, Artificial
  Peptide with targeting and/or antimicrobial activity
FLPIIASVAANVFSKIFCAISKKC

SEQ ID NO: 2252 - protein, 24 aa, Artificial
  Peptide with targeting and/or antimicrobial activity
FLPIIASVAAKVFPKIFCAISKKC

SEQ ID NO: 2253 - protein, 28 aa, Artificial
  Peptide with targeting and/or antimicrobial activity
GLMDTVKNVAKNLAGHMLDKLKCKITGC

SEQ ID NO: 2254 - protein, 13 aa, Artificial
  Peptide with targeting and/or antimicrobial activity
FLPIVGKLLSGLL

SEQ ID NO: 2255 - protein, 24 aa, Artificial
  Peptide with targeting and/or antimicrobial activity
FLPVVAGLAAKVLPSIICAVTKKC

SEQ ID NO: 2256 - protein, 25 aa, Artificial
  Peptide with targeting and/or antimicrobial activity
SMLSVLKNLGKVGLGLVACKINKQC

SEQ ID NO: 2257 - protein, 20 aa, Artificial
  Peptide with targeting and/or antimicrobial activity
FLGGLMKAFPALICAVTKKC

SEQ ID NO: 2258 - protein, 20 aa, Artificial
  Peptide with targeting and/or antimicrobial activity
FLGGLMKAFPAIICAVTKKC

SEQ ID NO: 2259 - protein, 31 aa, Artificial
  Peptide with targeting and/or antimicrobial activity
GLFLDTLKGAAKDVAGKLLEGLKCKIAGCKP

SEQ ID NO: 2260 - protein, 27 aa, Artificial
  Peptide with targeting and/or antimicrobial activity
GLFLDTLKGLAGKLLQGLKCIKAGCKP

SEQ ID NO: 2261 - protein, 13 aa, Artificial
  Peptide with targeting and/or antimicrobial activity
FLPFLAKILTGVL

SEQ ID NO: 2262 - protein, 13 aa, Artificial
  Peptide with targeting and/or antimicrobial activity
FLPLFASLIGKLL

SEQ ID NO: 2263 - protein, 13 aa, Artificial
  Peptide with targeting and/or antimicrobial activity
FLPFLASLLTKVL

SEQ ID NO: 2264 - protein, 13 aa, Artificial
  Peptide with targeting and/or antimicrobial activity
FLPFLASLLSKVL

SEQ ID NO: 2265 - protein, 13 aa, Artificial
  Peptide with targeting and/or antimicrobial activity
FLPFLATLLSKVL

SEQ ID NO: 2266 - protein, 24 aa, Artificial
  Peptide with targeting and/or antimicrobial activity
FLPAIVGAAGQFLPKIFCAISKKC

SEQ ID NO: 2267 - protein, 24 aa, Artificial
  Peptide with targeting and/or antimicrobial activity
FLPAIVGAAGKFLPKIFCAISKKC

SEQ ID NO: 2268 - protein, 24 aa, Artificial
  Peptide with targeting and/or antimicrobial activity
FFPIVAGVAGQVLKKIYCTISKKC

SEQ ID NO: 2269 - protein, 12 aa, Artificial
  Peptide with targeting and/or antimicrobial activity
ISLEICAIFHDN

SEQ ID NO: 2270 - protein, 21 aa, Artificial
  Peptide with targeting and/or antimicrobial activity
GCRFCCNCCPNMSGCGVCCRF

SEQ ID NO: 2271 - protein, 27 aa, Artificial
  Peptide with targeting and/or antimicrobial activity
GIGTKILGGVKTALKGALKELASTYAN

SEQ ID NO: 2272 - protein, 27 aa, Artificial
  Peptide with targeting and/or antimicrobial activity
GIGTKILGGVKTALKGALKELASTYVN

SEQ ID NO: 2273 - protein, 27 aa, Artificial
  Peptide with targeting and/or antimicrobial activity
GIGGKILSGLKTALKGAAKELASTYLH

SEQ ID NO: 2274 - protein, 27 aa, Artificial
  Peptide with targeting and/or antimicrobial activity
GIGGVLLSAGKAALKGLAKVLAEKYAN

SEQ ID NO: 2275 - protein, 27 aa, Artificial
  Peptide with targeting and/or antimicrobial activity
SIGAKILGGVKTFFKGALKELASTYLQ

SEQ ID NO: 2276 - protein, 20 aa, Artificial
  Peptide with targeting and/or antimicrobial activity
ILGPVISTIGGVLGGLLKNL

SEQ ID NO: 2277 - protein, 20 aa, Artificial
  Peptide with targeting and/or antimicrobial activity
ILGPVLGLVGNALGGLIKNE

SEQ ID NO: 2278 - protein, 20 aa, Artificial
  Peptide with targeting and/or antimicrobial activity
ILGPVLSLVGNALGGLLKNE

SEQ ID NO: 2279 - protein, 40 aa, Artificial
  Peptide with targeting and/or antimicrobial activity
ANTAFVSSAHNTQKIPAGAPFNRNLRAMLADLRQNAAFAG

SEQ ID NO: 2280 - protein, 24 aa, Artificial
  Peptide with targeting and/or antimicrobial activity
GLNTLKKVFQGLHEAIKLINNHVQ

SEQ ID NO: 2281 - protein, 24 aa, Artificial
  Peptide with targeting and/or antimicrobial activity
GLNALKKVFQGIHEAIKLINNHVQ

SEQ ID NO: 2282 - protein, 23 aa, Artificial
  Peptide with targeting and/or antimicrobial activity
GINTLKKVIQGLHEVIKLVSNHE

SEQ ID NO: 2283 - protein, 23 aa, Artificial
  Peptide with targeting and/or antimicrobial activity
GINTLKKVIQGLHEVIKLVSNHA

SEQ ID NO: 2284 - protein, 15 aa, Artificial
  Peptide with targeting and/or antimicrobial activity
SKGKKANKDVELARG

SEQ ID NO: 2285 - protein, 14 aa, Artificial
  Peptide with targeting and/or antimicrobial activity
FFPIGVFCKIFKTC

SEQ ID NO: 2286 - protein, 21 aa, Artificial
  Peptide with targeting and/or antimicrobial activity
FGLPMLSILPKALCILLKRKC

SEQ ID NO: 2287 - protein, 45 aa, Artificial
  Peptide with targeting and/or antimicrobial activity
FKLGSFLKKAWKSKLAKKLRAKGKEMLKDYAKGLLEGGSEEVPGQ

SEQ ID NO: 2288 - protein, 44 aa, Artificial
  Peptide with targeting and/or antimicrobial activity
GKVWDWIKSTAKKLWNSEPVKELKNTALNAAKNLVAEKIGATPS

SEQ ID NO: 2289 - protein, 44 aa, Artificial
  Peptide with targeting and/or antimicrobial activity
GKVWDWIKSTAKKLWNSEPVKELKNTALNAAKNFVAEKIGATPS

SEQ ID NO: 2290 - protein, 12 aa, Artificial
  Peptide with targeting and/or antimicrobial activity
AERVGAGAPVYL

SEQ ID NO: 2291 - protein, 13 aa, Artificial
  Peptide with targeting and/or antimicrobial activity
PKRKSATKGDEPA

SEQ ID NO: 2292 - protein, 17 aa, Artificial
  Peptide with targeting and/or antimicrobial activity
KAVAAKKSPKKAKKPAT

SEQ ID NO: 2293 - protein, 9 aa, Artificial
  Peptide with targeting and/or antimicrobial activity
DYHHGVRVL

SEQ ID NO: 2294 - protein, 33 aa, Artificial
  Peptide with targeting and/or antimicrobial activity
SHQDCYEALHKCMASHSKPFSCSMKFHMCLQQQ

SEQ ID NO: 2295 - protein, 22 aa, Artificial
  Peptide with targeting and/or antimicrobial activity
ALPKKLKYLNLFNDGFNYMGVV

SEQ ID NO: 2296 - protein, 39 aa, Artificial
  Peptide with targeting and/or antimicrobial activity
GWLKKIGKKIERVGQNTRDATVKGLEVAQQAANVAATVR

SEQ ID NO: 2297 - protein, 35 aa, Artificial
  Peptide with targeting and/or antimicrobial activity
RWKVFKKIEKVGRNIRDGVIKAAPAIEVLGQAKAL

SEQ ID NO: 2298 - protein, 41 aa, Artificial
  Peptide with targeting and/or antimicrobial activity
GKIPIGAIKKAGKAIGKGLRAVNIASTAHDVYTFFKPKKRH

SEQ ID NO: 2299 - protein, 22 aa, Artificial
  Peptide with targeting and/or antimicrobial activity
QRFIHPTYRPPPQPRRPVIMRA

SEQ ID NO: 2300 - protein, 55 aa, Artificial
  Peptide with targeting and/or antimicrobial activity
ATTGCSCPQCIIFDPICASSYKNGRRGFSSGCHMRCYNRCHGTDYFQISKGSKCI

SEQ ID NO: 2301 - protein, 25 aa, Artificial
  Peptide with targeting and/or antimicrobial activity
FFGWLIKGAIHAGKAIHGLIHRRRH

SEQ ID NO: 2302 - protein, 25 aa, Artificial
  Peptide with targeting and/or antimicrobial activity
FFGWLIRGAIHAGKAIHGLIHRRRH

SEQ ID NO: 2303 - protein, 20 aa, Artificial
  Peptide with targeting and/or antimicrobial activity
FIGLLISAGKAIHDLIRRRH

SEQ ID NO: 2304 - protein, 18 aa, Artificial
  Peptide with targeting and/or antimicrobial activity
DWTAWSALVAAACSVELL

SEQ ID NO: 2305 - protein, 10 aa, Artificial
  Peptide with targeting and/or antimicrobial activity
KTCENLADTY

SEQ ID NO: 2306 - protein, 39 aa, Artificial
  Peptide with targeting and/or antimicrobial activity
GWLKKIGKKIERVGQHTRDATIQTIAVAQQAANVAATAR

SEQ ID NO: 2307 - protein, 39 aa, Artificial
  Peptide with targeting and/or antimicrobial activity
GWLKKIGKKIERVGQHTRDATIQTIGVAQQAANVAATLK

SEQ ID NO: 2308 - protein, 32 aa, Artificial
  Peptide with targeting and/or antimicrobial activity
SLGGVISGAKKVAKVAIPIGKAVLPVVAKLVG

SEQ ID NO: 2309 - protein, 26 aa, Artificial
  Peptide with targeting and/or antimicrobial activity
HRHQGPIFDTRPSPFNPNQPRPGPIY

SEQ ID NO: 2310 - protein, 43 aa, Artificial
  Peptide with targeting and/or antimicrobial activity
VTCDILSVEAKGVKLNDAACAAHCLFRGRSGGYCNGKRVCVCR

SEQ ID NO: 2311 - protein, 45 aa, Artificial
  Peptide with targeting and/or antimicrobial activity
GFTQGVRNSQSCRRNKGICVPIRCPGSMRQIGTCLGAQVKCCRRK

SEQ ID NO: 2312 - protein, 29 aa, Artificial
  Peptide with targeting and/or antimicrobial activity
CSCRTSSCRFGERLSGACRLNGRIYRLCC

SEQ ID NO: 2313 - protein, 31 aa, Artificial
  Peptide with targeting and/or antimicrobial activity
ACYCRIGACVSGERLTGACGLNGRIYRLCCR

SEQ ID NO: 2314 - protein, 32 aa, Artificial
  Peptide with targeting and/or antimicrobial activity
VTCYCRSTRCGFRERLSGACGYRGRIYRLCCR

SEQ ID NO: 2315 - protein, 32 aa, Artificial
  Peptide with targeting and/or antimicrobial activity
VTCYCRRTRCGFRERLSGACGYRGRIYRLCCR

SEQ ID NO: 2316 - protein, 31 aa, Artificial
  Peptide with targeting and/or antimicrobial activity
RRCICTTRTCRFPYRRLGTCIFQNRVYTFCC

SEQ ID NO: 2317 - protein, 23 aa, Artificial
  Peptide with targeting and/or antimicrobial activity
CYSAAKYPGFQEFINRKYKSSRF

SEQ ID NO: 2318 - protein, 47 aa, Artificial
  Peptide with targeting and/or antimicrobial activity
HSSGYTRPLPKPSRPIFIRPIGCDVCYGIPSSTARLCCFRYGDCCHR

SEQ ID NO: 2319 - protein, 55 aa, Artificial
  Peptide with targeting and/or antimicrobial activity
QGYKGPYTRPILRPYVRPVVSYNACTLSCRGITTTQARSCSTRLGRCCHVAKGYS

SEQ ID NO: 2320 - protein, 55 aa, Artificial
  Peptide with targeting and/or antimicrobial activity
QGCKGPYTRPILRPYVRPVVSYNACTLSCRGITTTQARSCCTRLGRCCHVAKGYS

SEQ ID NO: 2321 - protein, 47 aa, Artificial
  Peptide with targeting and/or antimicrobial activity
YSSGYTRPLPKPSRPIFIRPIGCDVCYGIPSSTARLCCFRYGDCCHR

SEQ ID NO: 2322 - protein, 21 aa, Artificial
  Peptide with targeting and/or antimicrobial activity
GMASKAGAIAGKIAKVALKAL

SEQ ID NO: 2323 - protein, 27 aa, Artificial
  Peptide with targeting and/or antimicrobial activity
GIGGALLSAGKSALKGLAKGLAEHFAN

SEQ ID NO: 2324 - protein, 32 aa, Artificial
  Peptide with targeting and/or antimicrobial activity
SLGSFLKGVGTTLASVGKVVSDQFGKLLQAGQ

SEQ ID NO: 2325 - protein, 35 aa, Artificial
  Peptide with targeting and/or antimicrobial activity
GGLKKLGKKLEGVGKRVFKASEKALPVLTGYKAIG

SEQ ID NO: 2326 - protein, 49 aa, Artificial
  Peptide with targeting and/or antimicrobial activity
NLCERASLTWTGNCGNTGHCDTQCRNWESAKHGACHKRGNWKCFCYFDC

SEQ ID NO: 2327 - protein, 6 aa, Artificial
  Peptide with targeting and/or antimicrobial activity
RRWQWR

SEQ ID NO: 2328 - protein, 32 aa, Artificial
  Peptide with targeting and/or antimicrobial activity
WKSESVCTPGCVTGVLQTCFLQTITCNCHISK

SEQ ID NO: 2329 - protein, 11 aa, Artificial
  Peptide with targeting and/or antimicrobial activity
RVCYAIPLPIC

SEQ ID NO: 2330 - protein, 27 aa, Artificial
  Peptide with targeting and/or antimicrobial activity
KSKEKIGKEFKRIVQRIKDFLRNLVPR

SEQ ID NO: 2331 - protein, 18 aa, Artificial
  Peptide with targeting and/or antimicrobial activity
GNNRPIYIPQPRPPHPRL

SEQ ID NO: 2332 - protein, 27 aa, Artificial
  Peptide with targeting and/or antimicrobial activity
GFLGPLLKLAAKGVAKVIPHLIPSRQQ

SEQ ID NO: 2333 - protein, 25 aa, Artificial
  Peptide with targeting and/or antimicrobial activity
GCWSTVLGGLKKFAKGGLEAIVNPK

SEQ ID NO: 2334 - protein, 22 aa, Artificial
  Peptide with targeting and/or antimicrobial activity
GVFLDALKKFAKGGMNAVLNPK

SEQ ID NO: 2335 - protein, 18 aa, Artificial
  Peptide with targeting and/or antimicrobial activity
GLLGPLLKIAAKVGSNLL

SEQ ID NO: 2336 - protein, 28 aa, Artificial
  Peptide with targeting and/or antimicrobial activity
RVIEVVQGACRAIRHIPRRIRQGLERIL

SEQ ID NO: 2337 - protein, 29 aa, Artificial
  Peptide with targeting and/or antimicrobial activity
RIAGYGLRGLAVIIRICIRGLNLIFEIIR

SEQ ID NO: 2338 - protein, 10 aa, Artificial
  Peptide with targeting and/or antimicrobial activity
GLLKRIKTLL

SEQ ID NO: 2339 - protein, 22 aa, Artificial
  Peptide with targeting and/or antimicrobial activity
FIHHIFRGIVHAGRSIGRFLTG

SEQ ID NO: 2340 - protein, 31 aa, Artificial
  Peptide with targeting and/or antimicrobial activity
FFSASCVPGADKGQFPNLCRLCAGTGENKCA

SEQ ID NO: 2341 - protein, 47 aa, Artificial
  Peptide with targeting and/or antimicrobial activity
KSCCRNTWARNCYNVCRLPGTISREICAKKCRCKIISGTTCPSDYPK

SEQ ID NO: 2342 - protein, 42 aa, Artificial; identical to SEQ ID NO: 1885
  Peptide with targeting and/or antimicrobial activity

SEQ ID NO: 2343 - protein, 35 aa, Artificial
  Peptide with targeting and/or antimicrobial activity
GFGSLFKFLAKKVAKTVAKQAAKQGAKYIANKQME

SEQ ID NO: 2344 - protein, 35 aa, Artificial
  Peptide with targeting and/or antimicrobial activity
GFGSLFKFLAKKVAKTVAKQAAKQGAKYIANKQTE

SEQ ID NO: 2345 - protein, 35 aa, Artificial
  Peptide with targeting and/or antimicrobial activity
GFGSLFKFLAKKVAKTVAKQAAKQGAKYVANKHME

SEQ ID NO: 2346 - protein, 51 aa, Artificial
  Peptide with targeting and/or antimicrobial activity
SGRGKTGGKARAKAKTRSSRAGLQFPVGRVHRLLRKGNYAHRVGAGAPVYL

SEQ ID NO: 2347 - protein, 43 aa, Artificial; identical to SEQ ID NO: 2012
  Peptide with targeting and/or antimicrobial activity

SEQ ID NO: 2348 - protein, 19 aa, Artificial
  Peptide with targeting and/or antimicrobial activity
AKKVFKRLEKLFSKIQNDK

SEQ ID NO: 2349 - protein, 20 aa, Artificial
  Peptide with targeting and/or antimicrobial activity
ILGPVLGLVSDTLDDVLGIL

SEQ ID NO: 2350 - protein, 34 aa, Artificial
  Peptide with targeting and/or antimicrobial activity
GLVRKGGEKFGEKLRKIGQKIKEFFQKLALEIEQ

SEQ ID NO: 2351 - protein, 18 aa, Artificial
  Peptide with targeting and/or antimicrobial activity
KWKLFKKISKFLHLAKKF

SEQ ID NO: 2352 - protein, 18 aa, Artificial
  Peptide with targeting and/or antimicrobial activity
KWKLFKKILKFLHLAKKF

SEQ ID NO: 2353 - protein, 23 aa, Artificial
  Peptide with targeting and/or antimicrobial activity
FLRFIGSVIHGIGHLVHHIGVAL

SEQ ID NO: 2354 - protein, 12 aa, Artificial
  Peptide with targeting and/or antimicrobial activity
AKRHHGYKRKFH

SEQ ID NO: 2355 - protein, 20 aa, Artificial
  Peptide with targeting and/or antimicrobial activity
LAHQKPFIRKSYKCLHKRCR

SEQ ID NO: 2356 - protein, 21 aa, Artificial
  Peptide with targeting and/or antimicrobial activity
GLLSKVLGVGKKVLCGVSGLC

SEQ ID NO: 2357 - protein, 33 aa, Artificial
  Peptide with targeting and/or antimicrobial activity
GLLDSIKGMAISAGKGALQNLLKVASCKLDKTC

SEQ ID NO: 2358 - protein, 15 aa, Artificial
  Peptide with targeting and/or antimicrobial activity
VAIALKAAHYHTHKE

SEQ ID NO: 2359 - protein, 30 aa, Artificial
  Peptide with targeting and/or antimicrobial activity
ILQKAVLDCLKAAGSSLSKAAITAIYNKIT

SEQ ID NO: 2360 - protein, 18 aa, Artificial
  Peptide with targeting and/or antimicrobial activity
KIGAKIKIGAKIKIGAKI

SEQ ID NO: 2361 - protein, 25 aa, Artificial
  Peptide with targeting and/or antimicrobial activity
IWLTALKFLGKHAAKHLAKQQLSKL

SEQ ID NO: 2362 - protein, 27 aa, Artificial
  Peptide with targeting and/or antimicrobial activity
KIKWFKTMKSIAKFIAKEQMKKHLGGE

SEQ ID NO: 2363 - protein, 20 aa, Artificial
  Peptide with targeting and/or antimicrobial activity
QYRHRCCAWGPGRKYCKRWC

SEQ ID NO: 2364 - protein, 20 aa, Artificial
  Peptide with targeting and/or antimicrobial activity
EWGRRCCGWGPGRRYCRRWC

SEQ ID NO: 2365 - protein, 14 aa, Artificial
  Peptide with targeting and/or antimicrobial activity
KRLFKKLLFSLRKY

SEQ ID NO: 2366 - protein, 14 aa, Artificial
  Peptide with targeting and/or antimicrobial activity
LLLFLLKKRKKRKY

SEQ ID NO: 2367 - protein, 20 aa, Artificial
  Peptide with targeting and/or antimicrobial activity
ILGPVLSMVGSALGGLIKKI

SEQ ID NO: 2368 - protein, 20 aa, Artificial
  Peptide with targeting and/or antimicrobial activity
ILGPVLGLVGNALGGLIKKI

SEQ ID NO: 2369 - protein, 20 aa, Artificial
  Peptide with targeting and/or antimicrobial activity
ILGPVISKIGGVLGGLLKNL

SEQ ID NO: 2370 - protein, 6 aa, Artificial
  Peptide with targeting and/or antimicrobial activity
DDDDDD

SEQ ID NO: 2371 - protein, 29 aa, Artificial
  Peptide with targeting and/or antimicrobial activity
VLSKSLCTPGCITGPLQTCYLCFPTFAKC

SEQ ID NO: 2372 - protein, 28 aa, Artificial
  Peptide with targeting and/or antimicrobial activity
GKQYFPKVGGRLSGKAPLAAKTHRRLKP

SEQ ID NO: 2373 - protein, 20 aa, Artificial
  Peptide with targeting and/or antimicrobial activity
KTCENLADTFRGPCFATSNC

SEQ ID NO: 2374 - protein, 25 aa, Artificial
  Peptide with targeting and/or antimicrobial activity
GVVDILKGAAKDIAGHLASKVMNKL

SEQ ID NO: 2375 - protein, 20 aa, Artificial
  Peptide with targeting and/or antimicrobial activity
KSCCRNTTARNCYNVCRIPG

SEQ ID NO: 2376 - protein, 56 aa, Artificial
  Peptide with targeting and/or antimicrobial activity
GLGSVFGRLARILGRVIPKVAKKLGPKVAKVLPKVMKEAIPMAVEMAKSQEEQQPQ

SEQ ID NO: 2377 - protein, 88 aa, Artificial
  Peptide with targeting and/or antimicrobial activity
SVRTQDNAVNRQIFGSNGPYRDFQLSDCYLPLETNPYCNEWQFAYHWNNALMDCERAIYHGCNRTRNNFITLTACKNQAGPICNRRRH

SEQ ID NO: 2378 - protein, 30 aa, Artificial
  Peptide with targeting and/or antimicrobial activity
AEVAPAPAAAAPAKAPKKKAAAKPKKAGPS

SEQ ID NO: 2379 - protein, 18 aa, Artificial
  Peptide with targeting and/or antimicrobial activity
WLNALLHHGLNCAKGVLA

SEQ ID NO: 2380 - protein, 38 aa, Artificial
  Peptide with targeting and/or antimicrobial activity
GFGCPWNRYQCHSHCRSIGRLGGYCAGSLRLTCTCYRS

SEQ ID NO: 2381 - protein, 25 aa, Artificial
  Peptide with targeting and/or antimicrobial activity
GLLDTLKGAAKNVVGSLASKVMEKL

SEQ ID NO: 2382 - protein, 14 aa, Artificial
  Peptide with targeting and/or antimicrobial activity
IDWKKLLDAAKQIL

SEQ ID NO: 2383 - protein, 12 aa, Artificial
  Peptide with targeting and/or antimicrobial activity
ILGTILGLLKSL

SEQ ID NO: 2384 - protein, 25 aa, Artificial
  Peptide with targeting and/or antimicrobial activity
GVVDILKGAGKDLLAHLVGKISEKV

SEQ ID NO: 2385 - protein, 22 aa, Artificial
  Peptide with targeting and/or antimicrobial activity
GVLDIFKDAAKQILAHAAEKQI

SEQ ID NO: 2386 - protein, 21 aa, Artificial
  Peptide with targeting and/or antimicrobial activity
GVLDILKNAAKNILAHAAEQI

SEQ ID NO: 2387 - protein, 27 aa, Artificial
  Peptide with targeting and/or antimicrobial activity
RFGRFLRKIRRFRPKVTITIQGSARFG

SEQ ID NO: 2388 - protein, 46 aa, Artificial
  Peptide with targeting and/or antimicrobial activity
KSCCRNTVARNCYNVCRIPGTPRPVCAATCDCKLITGTKCPPGYEK

SEQ ID NO: 2389 - protein, 6 aa, Artificial
  Peptide with targeting and/or antimicrobial activity
FRWWHR

SEQ ID NO: 2390 - protein, 27 aa, Artificial
  Peptide with targeting and/or antimicrobial activity
GIGRKFLGGVKTTFRCGVKDFASKHLY

SEQ ID NO: 2391 - protein, 42 aa, Artificial
  Peptide with targeting and/or antimicrobial activity
GKIPVKAIKKAGAAIGKGLRAINIASTAHDVYSFFKPKHKKK

SEQ ID NO: 2392 - protein, 19 aa, Artificial
  Peptide with targeting and/or antimicrobial activity
KGRGKQGGKVRAKAKTRSS

SEQ ID NO: 2393 - protein, 21 aa, Artificial
  Peptide with targeting and/or antimicrobial activity
GFMKYIGPLIPHAVKAISDLI

SEQ ID NO: 2394 - protein, 26 aa, Artificial
  Peptide with targeting and/or antimicrobial activity
RVKRVWPLVIRTVIAGYNLYRAIKKK

SEQ ID NO: 2395 - protein, 25 aa, Artificial
  Peptide with targeting and/or antimicrobial activity
ATRVVYCNRRSGSVVGGDDTVYYEG

SEQ ID NO: 2396 - protein, 35 aa, Artificial
  Peptide with targeting and/or antimicrobial activity
TTLTLHNLCPYPVWWLVTPNNGGFPIIDNTPVVLG

SEQ ID NO: 2397 - protein, 10 aa, Artificial
  Peptide with targeting and/or antimicrobial activity
EQCREEEDDR

SEQ ID NO: 2398 - protein, 44 aa, Artificial
  Peptide with targeting and/or antimicrobial activity
GKVWDWIKSAAKKIWSSEPVSQLKGQVLNAAKNYVAEKIGATPT

SEQ ID NO: 2399 - protein, 47 aa, Artificial
  Peptide with targeting and/or antimicrobial activity
KTCENLADTFRGPCFATSNCDDHCKNKEHLLSGRCRDDFRCWCTRNC

SEQ ID NO: 2400 - protein, 17 aa, Artificial
  Peptide with targeting and/or antimicrobial activity
FLIGMTHGLICLISRKC

SEQ ID NO: 2401 - protein, 17 aa, Artificial
  Peptide with targeting and/or antimicrobial activity
FLIGMTQGLICLITRKC

SEQ ID NO: 2402 - protein, 33 aa, Artificial
  Peptide with targeting and/or antimicrobial activity
GLFDVVKGVLKGVGKNVAGSLLEQLKCKLSGGC

SEQ ID NO: 2403 - protein, 15 aa, Artificial
  Peptide with targeting and/or antimicrobial activity
VWPLGLVICKALKIC

SEQ ID NO: 2404 - protein, 38 aa, Artificial
  Peptide with targeting and/or antimicrobial activity
GLFSVVTGVLKAVGKNVAKNVGGSLLEQLKCKKISGGC

SEQ ID NO: 2405 - protein, 20 aa, Artificial
  Peptide with targeting and/or antimicrobial activity
FLPLLLAGLPLKLCFLFKKC

SEQ ID NO: 2406 - protein, 26 aa, Artificial
  Peptide with targeting and/or antimicrobial activity
SIITMTKEAKLPQLWKQIACRLYNTC

SEQ ID NO: 2407 - protein, 26 aa, Artificial
  Peptide with targeting and/or antimicrobial activity
SIITMTKEAKLPQSWKQIACRLYNTC

SEQ ID NO: 2408 - protein, 46 aa, Artificial
  Peptide with targeting and/or antimicrobial activity
GLFSKFAGKGIKNLIFKGVKHIGKEVGMDVIRTGIDVAGCKIKGEC

SEQ ID NO: 2409 - protein, 33 aa, Artificial
  Peptide with targeting and/or antimicrobial activity
GLLDTFKNLALNAAKSAGVSVLNSLSCKLSKTC

SEQ ID NO: 2410 - protein, 33 aa, Artificial
  Peptide with targeting and/or antimicrobial activity
GVLGTVKNLLIGAGKSAAQSVLKTLSCKLSNDC

SEQ ID NO: 2411 - protein, 37 aa, Artificial
  Peptide with targeting and/or antimicrobial activity
GLFTLIKGAAKLIGKTVAKEAGKTGLELMACKITNQC

SEQ ID NO: 2412 - protein, 24 aa, Artificial
  Peptide with targeting and/or antimicrobial activity
FLPLLAGLAANFLPKIFCKITKKC

SEQ ID NO: 2413 - protein, 21 aa, Artificial
  Peptide with targeting and/or antimicrobial activity
GLLSGILGAGKHIVCGLSGLC

SEQ ID NO: 2414 - protein, 21 aa, Artificial
  Peptide with targeting and/or antimicrobial activity
GLFGKILGVGKKVLCGLSGMC

SEQ ID NO: 2415 - protein, 21 aa, Artificial
  Peptide with targeting and/or antimicrobial activity
GLLSGILGAGKNIVCGLSGLC

SEQ ID NO: 2416 - protein, 34 aa, Artificial
  Peptide with targeting and/or antimicrobial activity
GFSSLFKAGAKYLLKSVGKAGAQQLACKAANNCA

SEQ ID NO: 2417 - protein, 30 aa, Artificial
  Peptide with targeting and/or antimicrobial activity
GVITDALKGAAKTVAAELLRKAHCKLTNSC

SEQ ID NO: 2418 - protein, 26 aa, Artificial
  Peptide with targeting and/or antimicrobial activity
VIDDLKKVAKKVRRELLCKKHHKKLN

SEQ ID NO: 2419 - protein, 31 aa, Artificial
  Peptide with targeting and/or antimicrobial activity
SIWEGIKNAGKGFLVSILDKVRCKVAGGCNP

SEQ ID NO: 2420 - protein, 13 aa, Artificial
  Peptide with targeting and/or antimicrobial activity
FLPLLFGAISHLL

SEQ ID NO: 2421 - protein, 33 aa, Artificial
  Peptide with targeting and/or antimicrobial activity
GIMSLFKGVLKTAGKHVAGSLVDQLKCKITGGC

SEQ ID NO: 2422 - protein, 22 aa, Artificial
  Peptide with targeting and/or antimicrobial activity
FLGSIVGALASALPSLISKIRN

SEQ ID NO: 2423 - protein, 13 aa, Artificial
  Peptide with targeting and/or antimicrobial activity
FLGALAKIISGIF

SEQ ID NO: 2424 - protein, 24 aa, Artificial
  Peptide with targeting and/or antimicrobial activity
FLPILAGLAAKIVPKLFCLATKKC

SEQ ID NO: 2425 - protein, 13 aa, Artificial
  Peptide with targeting and/or antimicrobial activity
FLPIVGKLLSGLL

SEQ ID NO: 2426 - protein, 13 aa, Artificial
  Peptide with targeting and/or antimicrobial activity
FLPIIGKLLSGLL

SEQ ID NO: 2427 - protein, 13 aa, Artificial
  Peptide with targeting and/or antimicrobial activity
FLPLVTGLLSGLL

SEQ ID NO: 2428 - protein, 14 aa, Artificial
  Peptide with targeting and/or antimicrobial activity
NFLGTLVNLAKKIL

SEQ ID NO: 2429 - protein, 13 aa, Artificial
  Peptide with targeting and/or antimicrobial activity
FLSAITSLLGKLL

SEQ ID NO: 2430 - protein, 21 aa, Artificial
  Peptide with targeting and/or antimicrobial activity
GIWDTIKSMGKVFAGKILQNL

SEQ ID NO: 2431 - protein, 23 aa, Artificial
  Peptide with targeting and/or antimicrobial activity
GLLRASSVWGRKYYVDLAGCAKA

SEQ ID NO: 2432 - protein, 20 aa, Artificial
  Peptide with targeting and/or antimicrobial activity
FLSLALAALPKFLCLVFKKC

SEQ ID NO: 2433 - protein, 20 aa, Artificial
  Peptide with targeting and/or antimicrobial activity
FLSLALAALPKLFCLIFKKC

SEQ ID NO: 2434 - protein, 20 aa, Artificial
  Peptide with targeting and/or antimicrobial activity
FLPLLLAGLPKLLCLFFKKC

SEQ ID NO: 2435 - protein, 33 aa, Artificial
  Peptide with targeting and/or antimicrobial activity
GLFDVVKGVLKGAGKNVAGSLLEQLKCKLSGGC

SEQ ID NO: 2436 - protein, 33 aa, Artificial; identical to SEQ ID NO: 2402
  Peptide with targeting and/or antimicrobial activity

SEQ ID NO: 2437 - protein, 33 aa, Artificial
  Peptide with targeting and/or antimicrobial activity
GIFDVVKGVLKGVGKNVAGSLLEQLKCKLSGGC

SEQ ID NO: 2438 - protein, 37 aa, Artificial
  Peptide with targeting and/or antimicrobial activity
GLFSVVTGVLKAVGKNVAKNVGGSLLEQLKCKISGGC

SEQ ID NO: 2439 - protein, 14 aa, Artificial
  Peptide with targeting and/or antimicrobial activity
FIGPIISALASLFG

SEQ ID NO: 2440 - protein, 28 aa, Artificial
  Peptide with targeting and/or antimicrobial activity
ALFSILRGLKKLGNMGQAFVNCKIYKKC

SEQ ID NO: 2441 - protein, 27 aa, Artificial
  Peptide with targeting and/or antimicrobial activity
ALSILRGLEKLAKMGIALTNCKATKKC

SEQ ID NO: 2442 - protein, 27 aa, Artificial
  Peptide with targeting and/or antimicrobial activity
ALSILKGLEKLAKMGIALTNCKATKKC

SEQ ID NO: 2443 - protein, 31 aa, Artificial
  Peptide with targeting and/or antimicrobial activity
GFFSTVKNLATNVAGTVIDTLKCKVTGGCRS

SEQ ID NO: 2444 - protein, 31 aa, Artificial
  Peptide with targeting and/or antimicrobial activity
GFLSTVKNLATNVAGTVIDTLKCKVTGGCRS

SEQ ID NO: 2445 - protein, 48 aa, Artificial
  Peptide with targeting and/or antimicrobial activity
GIFPKIIGKGIKTGIVNGIKSLVKGVGMKVFKAGLNNIGNTGCNEDEC

SEQ ID NO: 2446 - protein, 48 aa, Artificial
  Peptide with targeting and/or antimicrobial activity
GIFPKIIGKGIKTGIVNGIKSLVKGVGMKVFKAGLSNIGNTGCNEDEC

SEQ ID NO: 2447 - protein, 38 aa, Artificial
  Peptide with targeting and/or antimicrobial activity
ALLGDFFRKSKEKIGKEFKRIVQRIKDFLRNLVPRTES

SEQ ID NO: 2448 - protein, 20 aa, Artificial
  Peptide with targeting and/or antimicrobial activity
KRIVQRIKDFLRNLVPRTES

SEQ ID NO: 2449 - protein, 30 aa, Artificial
  Peptide with targeting and/or antimicrobial activity
KSKEKIGKEFKRIVQRIKDFLRNLVPRTES

SEQ ID NO: 2450 - protein, 31 aa, Artificial
  Peptide with targeting and/or antimicrobial activity
RKSKEKIGKEFKRIVQRIKDFLRNLVPRTES

SEQ ID NO: 2451 - protein, 23 aa, Artificial
  Peptide with targeting and/or antimicrobial activity
LLGDFFRKSKEKIGKEFKRIVQR

SEQ ID NO: 2452 - protein, 29 aa, Artificial
  Peptide with targeting and/or antimicrobial activity
LLGDFFRKSKEKIGKEFKRIVQRIKDFLR

SEQ ID NO: 2453 - protein, 25 aa, Artificial
  Peptide with targeting and/or antimicrobial activity
GEILCNLCTGLINTLENLLTTKGAD

SEQ ID NO: 2454 - protein, 43 aa, Artificial
  Peptide with targeting and/or antimicrobial activity
KYYGNGVSCNKKGCSVDWGKAIGIIGNNSAANLATGGAAGWSK

SEQ ID NO: 2455 - protein, 22 aa, Artificial
  Peptide with targeting and/or antimicrobial activity
GLIGSIGKALGGLLVDVLKPKL

SEQ ID NO: 2456 - protein, 26 aa, Artificial
  Peptide with targeting and/or antimicrobial activity
GLIGSIGKALGGLLVDVLKPKLQAAS

SEQ ID NO: 2457 - protein, 21 aa, Artificial
  Peptide with targeting and/or antimicrobial activity
GLLGLLGSVVSHVVPAIVGHF

SEQ ID NO: 2458 - protein, 33 aa, Artificial
  Peptide with targeting and/or antimicrobial activity
GFFALIPKIISSPLFKTLLSAVGSALSSSGEQE

SEQ ID NO: 2459 - protein, 33 aa, Artificial
  Peptide with targeting and/or antimicrobial activity
GFFALIPKIISSPIFKTLLSAVGSALSSSGGQE

SEQ ID NO: 2460 - protein, 33 aa, Artificial
  Peptide with targeting and/or antimicrobial activity
GFFAFIPKIISSPLFKTLLSAVGSALSSSGEQE

SEQ ID NO: 2461 - protein, 33 aa, Artificial
  Peptide with targeting and/or antimicrobial activity
GFFAFIPKIISSPLFKTLLSAVGSALSSSGDQE

SEQ ID NO: 2462 - protein, 24 aa, Artificial
  Peptide with targeting and/or antimicrobial activity
FLPLIAGLAANFLPKIFCAITKKC

SEQ ID NO: 2463 - protein, 24 aa, Artificial
  Peptide with targeting and/or antimicrobial activity
FLPVIAGVAAKFLPKIFCAITKKC

SEQ ID NO: 2464 - protein, 46 aa, Artificial
  Peptide with targeting and/or antimicrobial activity
GLFPKINKKKAKTGVFNIIKTVGKEAGMDLIRTGIDTIGCKIKGEC

SEQ ID NO: 2465 - protein, 46 aa, Artificial
  Peptide with targeting and/or antimicrobial activity
GIFTKINKKKAKTGVFNIIKTIGKEAGMDVIRAGIDTISCKIKGEC

SEQ ID NO: 2466 - protein, 37 aa, Artificial
  Peptide with targeting and/or antimicrobial activity
GLFSILKGVGKIALKGLAKNMGKMGLDLVSCKISKEC

SEQ ID NO: 2467 - protein, 28 aa, Artificial
  Peptide with targeting and/or antimicrobial activity
GIMDTVKNVAKNLAGQLLDKLKCKITAC

SEQ ID NO: 2468 - protein, 28 aa, Artificial
  Peptide with targeting and/or antimicrobial activity
GIMDTVKNAAKDLAGQLLDKLKCRITGC

SEQ ID NO: 2469 - protein, 28 aa, Artificial
  Peptide with targeting and/or antimicrobial activity
GLLDTIKNTAKNLAVGLLDKIKCKMTGC

SEQ ID NO: 2470 - protein, 28 aa, Artificial
  Peptide with targeting and/or antimicrobial activity
GIMDSVKNVAKNIAGQLLDKLKCKITGC

SEQ ID NO: 2471 - protein, 28 aa, Artificial
  Peptide with targeting and/or antimicrobial activity
GIMDSVKNAAKNLAGQLLDTIKCKITAC

SEQ ID NO: 2472 - protein, 27 aa, Artificial
  Peptide with targeting and/or antimicrobial activity
GIMDTVKNAAKDLAGQLDKLKCRITGC

SEQ ID NO: 2473 - protein, 13 aa, Artificial
  Peptide with targeting and/or antimicrobial activity
FLPLVGKILSGLI

SEQ ID NO: 2474 - protein, 12 aa, Artificial
  Peptide with targeting and/or antimicrobial activity
FLPIASLLGKYL

SEQ ID NO: 2475 - protein, 37 aa, Artificial
  Peptide with targeting and/or antimicrobial activity
GILSLFTGGIKALGKTLFKMAGKAGAEHLACKATNQC

SEQ ID NO: 2476 - protein, 37 aa, Artificial
  Peptide with targeting and/or antimicrobial activity
GLFSILRGAAKFASKGLGKDLTKLGVDLVACKISKQC

SEQ ID NO: 2477 - protein, 37 aa, Artificial
  Peptide with targeting and/or antimicrobial activity
GFSSIFRGVAKFASKGLGKDLARLGVNLVACKISKQC

SEQ ID NO: 2478 - protein, 13 aa, Artificial
  Peptide with targeting and/or antimicrobial activity
FLPAIAGILSQLF

SEQ ID NO: 2479 - protein, 13 aa, Artificial
  Peptide with targeting and/or antimicrobial activity
FLPLIAGLIGKLF

SEQ ID NO: 2480 - protein, 13 aa, Artificial
  Peptide with targeting and/or antimicrobial activity
EGGGPQWAVGHFM

SEQ ID NO: 2481 - protein, 11 aa, Artificial
  Peptide with targeting and/or antimicrobial activity
EPHPDEFVGLM

SEQ ID NO: 2482 - protein, 11 aa, Artificial
  Peptide with targeting and/or antimicrobial activity
EPNPDEFVGLM

SEQ ID NO: 2483 - protein, 11 aa, Artificial
  Peptide with targeting and/or antimicrobial activity
EPHPNEFVGLM

SEQ ID NO: 2484 - protein, 11 aa, Artificial
  Peptide with targeting and/or antimicrobial activity
EPNPDEFFGLM

SEQ ID NO: 2485 - protein, 24 aa, Artificial
  Peptide with targeting and/or antimicrobial activity
FWGALAKGALKLIPSLFSSFSKKD

SEQ ID NO: 2486 - protein, 11 aa, Artificial
  Peptide with targeting and/or antimicrobial activity
EPNPNEFFGLM

SEQ ID NO: 2487 - protein, 32 aa, Artificial; identical to SEQ ID NO: 2328
  Peptide with targeting and/or antimicrobial activity

SEQ ID NO: 2488 - protein, 29 aa, Artificial
  Peptide with targeting and/or antimicrobial activity
VLSKSLCTPGCITGPLQTCYLCFPTFAKC

SEQ ID NO: 2489 - protein, 49 aa, Artificial
  Peptide with targeting and/or antimicrobial activity
FELDRICGYGTARCRKKCRSQEYRIGRCPNTYACCLRKWDESLLNRTKP

SEQ ID NO: 2490 - protein, 37 aa, Artificial
  Peptide with targeting and/or antimicrobial activity
RLGNFFRKVKEKIGGGLKKVGQKIKDFLGNLVPRTAS

SEQ ID NO: 2491 - protein, 43 aa, Artificial
  Peptide with targeting and/or antimicrobial activity
GLRKKFRKTRKRIQKLGRKIGKTGRKVWKAWREYGQIPYPCRI

SEQ ID NO: 2492 - protein, 38 aa, Artificial
  Peptide with targeting and/or antimicrobial activity
RLKELITTGGQKIGEKIRRIGQRIKDFFKNLQPREEKS

SEQ ID NO: 2493 - protein, 37 aa, Artificial
  Peptide with targeting and/or antimicrobial activity
GLFSILKGVGKIAIKGLGKNLGKMGLDLVSCKISKEC

SEQ ID NO: 2494 - protein, 33 aa, Artificial
  Peptide with targeting and/or antimicrobial activity
GLFGRLRDSLQRGGQKILEKAERIWCKIKDIFR

SEQ ID NO: 2495 - protein, 43 aa, Artificial
  Peptide with targeting and/or antimicrobial activity
RFRPPIRRPPIRPPFRPPFRPPVRPPIRPPFRPPFRPPIGPFP

SEQ ID NO: 2496 - protein, 52 aa, Artificial
  Peptide with targeting and/or antimicrobial activity
RRLRPRHQHFPSERPWPKPLPLPLPRPGPRPWPKPLPLPLPRPGLRPWPKPL

SEQ ID NO: 2497 - protein, 60 aa, Artificial
  Peptide with targeting and/or antimicrobial activity
RRLRPRRPRLPRPRPRPRPRPRSLPLPRPQPRRIPRPILLPWRPPRPIPRPQIQPIPRWL

SEQ ID NO: 2498 - protein, 94 aa, Artificial
  Peptide with targeting and/or antimicrobial activity
RRLRPRRPRLPRPRPRPRPRPRSLPLPRPKPRPIPRPLPLPRPRPKPIPRPLPLPRPRPRRIPRPLPLPRPRPRPIPRPLPLPQPQPSPIPRPL

SEQ ID NO: 2499 - protein, 28 aa, Artificial
  Peptide with targeting and/or antimicrobial activity
GIMDTVKGVAKTVAASLLDKLKCKITGC

SEQ ID NO: 2500 - protein, 26 aa, Artificial
  Peptide with targeting and/or antimicrobial activity
KRFGRLAKSFLRMRILLPRRKILLAS

SEQ ID NO: 2501 - protein, 27 aa, Artificial
  Peptide with targeting and/or antimicrobial activity
KRRHWFPLSFQEFLEQLRRFRDQLPFP

SEQ ID NO: 2502 - protein, 40 aa, Artificial
  Peptide with targeting and/or antimicrobial activity
KRFHSVGSLIQRHQQMIRDKSEATRHGIRIITRPKLLLAS

SEQ ID NO: 2503 - protein, 79 aa, Artificial
  Peptide with targeting and/or antimicrobial activity
AFPPPNVPGPRFPPPNFPGPRFPPPNFPGPRFPPPNFPGPRFPPPNFPGPPFPPPIFPGPWFPPPPPFRPPPFGPPRFP

SEQ ID NO: 2504 - protein, 79 aa, Artificial
  Peptide with targeting and/or antimicrobial activity
AFPPPNVPGPRFPPPNVPGPRFPPPNFPGPRFPPPNFPGPRFPPPNFPGPPFPPPIFPGPWFPPPPPFRPPPFGPPRFP

SEQ ID NO: 2505 - protein, 37 aa, Artificial
  Peptide with targeting and/or antimicrobial activity
GFFKKAWRKVKHAGRRVLDTAKGVGRHYVNNWLNRYR

SEQ ID NO: 2506 - protein, 30 aa, Artificial
  Peptide with targeting and/or antimicrobial activity
GWFKKAWRKVKNAGRRVLKGVGIHYGVGLI

SEQ ID NO: 2507 - protein, 66 aa, Artificial
  Peptide with targeting and/or antimicrobial activity
RICSRDKNCVSRPGVGSIIGRPGGGSLIGRPGGGSVIGRPGGGSPPGGGSFNDEFIRDHSDGNRFA

SEQ ID NO: 2508 - protein, 23 aa, Artificial
  Peptide with targeting and/or antimicrobial activity
AIGSILGALAKGLPTLISWIKNR

SEQ ID NO: 2509 - protein, 13 aa, Artificial
  Peptide with targeting and/or antimicrobial activity
FLPILGKLLSGIL

SEQ ID NO: 2510 - protein, 13 aa, Artificial
  Peptide with targeting and/or antimicrobial activity
GLFDIIKNIVSTL

SEQ ID NO: 2511 - protein, 13 aa, Artificial
  Peptide with targeting and/or antimicrobial activity
GLFDIIKNIFSGL

SEQ ID NO: 2512 - protein, 23 aa, Artificial
  Peptide with targeting and/or antimicrobial activity
GLWQLIKDKIKDAATGFVTGIQS

SEQ ID NO: 2513 - protein, 23 aa, Artificial
  Peptide with targeting and/or antimicrobial activity
GLWQFIKDKLKDAATGLVTGIQS

SEQ ID NO: 2514 - protein, 23 aa, Artificial
  Peptide with targeting and/or antimicrobial activity
GLWQFIKDKFKDAATGLVTGIQS

SEQ ID NO: 2515 - protein, 20 aa, Artificial
  Peptide with targeting and/or antimicrobial activity
GLLGSIGNAIGAFIANKLKP

SEQ ID NO: 2516 - protein, 21 aa, Artificial
  Peptide with targeting and/or antimicrobial activity
GLLGSIGNAIGAFIANKLKPK

SEQ ID NO: 2517 - protein, 20 aa, Artificial
  Peptide with targeting and/or antimicrobial activity
GLLASLGKVLGGYLAEKLKP

SEQ ID NO: 2518 - protein, 21 aa, Artificial
  Peptide with targeting and/or antimicrobial activity
GLLGSIGKVLGGYLAEKLKPK

SEQ ID NO: 2519 - protein, 21 aa, Artificial
  Peptide with targeting and/or antimicrobial activity
GLLASLGKVLGGYLAEKLKPK

SEQ ID NO: 2520 - protein, 21 aa, Artificial
  Peptide with targeting and/or antimicrobial activity
GLLASLGKVFGGYLAEKLKPK

SEQ ID NO: 2521 - protein, 37 aa, Artificial
  Peptide with targeting and/or antimicrobial activity
GFGCPNDYPCHRHCKSIPGRAGGYCGGAHRLRCTCYR

SEQ ID NO: 2522 - protein, 39 aa, Artificial
  Peptide with targeting and/or antimicrobial activity
GFGCPNNYACHQHCKSIRGYCGGYCAGWFRLRCTCYRCG

SEQ ID NO: 2523 - protein, 37 aa, Artificial
  Peptide with targeting and/or antimicrobial activity
GFGCPLNQGACHRHCRSIRRRGGYCAGFFKQTCCYRN

SEQ ID NO: 2524 - protein, 37 aa, Artificial
  Peptide with targeting and/or antimicrobial activity
GFGCPFNQGACHRHCRSIRRRGGYCAGLFKQTCTCYR

SEQ ID NO: 2525 - protein, 37 aa, Artificial
  Peptide with targeting and/or antimicrobial activity
GYGCPFNQYQCHSHCSGIRGYKGGYCKGTFKQTCKCY

SEQ ID NO: 2526 - protein, 45 aa, Artificial
  Peptide with targeting and/or antimicrobial activity
RTCMKKEGWGKCLIDTTCAHSCKNRGYIGGNCKGMTRTCYCLVNC

SEQ ID NO: 2527 - protein, 24 aa, Artificial
  Peptide with targeting and/or antimicrobial activity
GLLNGLALRLGKRALKKIIKRLCR

SEQ ID NO: 2528 - protein, 11 aa, Artificial
  Peptide with targeting and/or antimicrobial activity
SLLSLLRKLIT

SEQ ID NO: 2529 - protein, 18 aa, Artificial
  Peptide with targeting and/or antimicrobial activity
RCLCRRGVCRCLCRRGVC

SEQ ID NO: 2530 - protein, 18 aa, Artificial
  Peptide with targeting and/or antimicrobial activity
RCICTRGFCRCICTRGFC

SEQ ID NO: 2531 - protein, 6 aa, Artificial
  Peptide with targeting and/or antimicrobial activity
RRWWRF

SEQ ID NO: 2532 - protein, 37 aa, Artificial
  Peptide with targeting and/or antimicrobial activity
DIQIPGIKKPTHRDIIIPNWNPNVRTQPWQRFGGNKS

SEQ ID NO: 2533 - protein, 42 aa, Artificial
  Peptide with targeting and/or antimicrobial activity
EADEPLWLYKGDNIERAPTTADHPILPSIIDDVKLDPNRRYA

SEQ ID NO: 2534 - protein, 42 aa, Artificial
  Peptide with targeting and/or antimicrobial activity
EIRLPEPFRFPSPTVPKPIDIDPILPHPWSPRQTYPIIARRS

SEQ ID NO: 2535 - protein, 44 aa, Artificial
  Peptide with targeting and/or antimicrobial activity
DKLIGSCVWGATNYTSDCNAECKRRGYKGGHCGSFWNVNCWCEE

SEQ ID NO: 2536 - protein, 51 aa, Artificial
  Peptide with targeting and/or antimicrobial activity
VQETQKLAKTVGANLEETNKKLAPQIKSAYDDFVKQAQEVQKKLHEAASKQ

SEQ ID NO: 2537 - protein, 60 aa, Artificial
  Peptide with targeting and/or antimicrobial activity
ETESTPDYLKNIQQQLEEYTKNFNTQVQNAFDSDKIKSEVNNFIESLGKILNTEKKEAPK

SEQ ID NO: 2538 - protein, 39 aa, Artificial
  Peptide with targeting and/or antimicrobial activity
ENFFKEIERAGQRIRDAIISAAPAVETLAQAQKIIKGGD

SEQ ID NO: 2539 - protein, 24 aa, Artificial
  Peptide with targeting and/or antimicrobial activity
ALWKDILKNAGKAALNEINQLVNQ

SEQ ID NO: 2540 - protein, 20 aa, Artificial
  Peptide with targeting and/or antimicrobial activity
FLSLIPHAINAVSTLVHHSG

SEQ ID NO: 2541 - protein, 19 aa, Artificial
  Peptide with targeting and/or antimicrobial activity
FLSLIPHAINAVSAIAKHS

SEQ ID NO: 2542 - protein, 17 aa, Artificial
  Peptide with targeting and/or antimicrobial activity
SLIPHAINAVSAIAKHF

SEQ ID NO: 2543 - protein, 19 aa, Artificial
  Peptide with targeting and/or antimicrobial activity
FLSLIPHAINAVSAIAKHF

SEQ ID NO: 2544 - protein, 25 aa, Artificial
  Peptide with targeting and/or antimicrobial activity
GLWSTIKNVGKEAAIAAGKAALGAL

SEQ ID NO: 2545 - protein, 24 aa, Artificial
  Peptide with targeting and/or antimicrobial activity
GLRSKIWLWVLLMIWQESNKFKKM

SEQ ID NO: 2546 - protein, 46 aa, Artificial [sequence omitted]

SEQ ID NO: 2547 - protein, 58 aa, Artificial
  Peptide with targeting and/or antimicrobial activity
IYWIADQFGIHLATGTARKLLDAMASGASLGTAFAAILGVTLPAWALAAAGALGATAA

SEQ ID NO: 2548 - protein, 69 aa, Artificial
  Peptide with targeting and/or antimicrobial activity
VAGALGVQTAAATTIVNVILNAGTLVTVLGIIASIASGGAGTLMTIGWATFKATVQKLAKQSMARAIAY

SEQ ID NO: 2549 - protein, 82 aa, Artificial
  Peptide with targeting and/or antimicrobial activity
PNWTKIGKCAGSIAWAIGSGLFGGAKLIKIKKYIAELGGLQKAAKLLVGATTWEEKLHAGGYALINLAAELTGVAGIQANCF

SEQ ID NO: 2550 - protein, 25 aa, Artificial
  Peptide with targeting and/or antimicrobial activity
GLLGAMFKVASKVLPHVVPAITEHF

SEQ ID NO: 2551 - protein, 21 aa, Artificial
  Peptide with targeting and/or antimicrobial activity
GLLGLLGSVVSHVLPAITQHL

SEQ ID NO: 2552 - protein, 23 aa, Artificial
  Peptide with targeting and/or antimicrobial activity
GIGKFLHSAGKFGKAFVGEIMKS

SEQ ID NO: 2553 - protein, 48 aa, Artificial
  Peptide with targeting and/or antimicrobial activity
FRGLAKLLKIGLKSFARVLKKVLPKAAKAGKALAKSMADENAIRQQNQ

SEQ ID NO: 2554 - protein, 37 aa, Artificial
  Peptide with targeting and/or antimicrobial activity
GKFSVFGKILRSIAKVFKGVGKVRKQFKTASDLDKNQ

SEQ ID NO: 2555 - protein, 37 aa, Artificial
  Peptide with targeting and/or antimicrobial activity
GKFSGFAKILKSIAKFFKGVGKVRKGFKEASDLDKNQ

SEQ ID NO: 2556 - protein, 37 aa, Artificial
  Peptide with targeting and/or antimicrobial activity
GKLSGISKVLRAIAKFFKGVGKARKQFKEASDLDKNQ

SEQ ID NO: 2557 - protein, 37 aa, Artificial
  Peptide with targeting and/or antimicrobial activity
GKFSVFSKILRSIAKVFKGVGKVRKGFKTASDLDKNQ

SEQ ID NO: 2558 - protein, 24 aa, Artificial
  Peptide with targeting and/or antimicrobial activity
GKGRWLERIGKAGGIIIGGALDHL

SEQ ID NO: 2559 - protein, 20 aa, Artificial
  Peptide with targeting and/or antimicrobial activity
WLRRIGKGVKIIGGAALDHL

SEQ ID NO: 2560 - protein, 26 aa, Artificial
  Peptide with targeting and/or antimicrobial activity
GRRKRKWLRRIGKGVKIIGGAALDHL

SEQ ID NO: 2561 - protein, 24 aa, Artificial
  Peptide with targeting and/or antimicrobial activity
FLGALIKGAIHGGRFIHGMIQNHH

SEQ ID NO: 2562 - protein, 25 aa, Artificial
  Peptide with targeting and/or antimicrobial activity
GWGSIFKHGRHAAKHIGHAAVNHYL

SEQ ID NO: 2563 - protein, 25 aa, Artificial
  Peptide with targeting and/or antimicrobial activity
RWGKWFKKATHVGKHVGKAALTAYL

SEQ ID NO: 2564 - protein, 19 aa, Artificial
  Peptide with targeting and/or antimicrobial activity
FFRLLFHGVHHVGKIKPRA

SEQ ID NO: 2565 - protein, 25 aa, Artificial
  Peptide with targeting and/or antimicrobial activity
GWKSVFRKAKKVGKTVGGLALDHYL

SEQ ID NO: 2566 - protein, 25 aa, Artificial
  Peptide with targeting and/or antimicrobial activity
GWKKWFNRAKKVGKTVGGLAVDHYL

SEQ ID NO: 2567 - protein, 23 aa, Artificial
  Peptide with targeting and/or antimicrobial activity
GWRLLLKKAEVKTVGKLALKHYL

SEQ ID NO: 2568 - protein, 26 aa, Artificial
  Peptide with targeting and/or antimicrobial activity
AGWGSIFKHIFKAGKFIHGAIQAHND

SEQ ID NO: 2569 - protein, 21 aa, Artificial
  Peptide with targeting and/or antimicrobial activity
GFWGKLFKLGLHGIGLLHLHL

SEQ ID NO: 2570 - protein, 19 aa, Artificial
  Peptide with targeting and/or antimicrobial activity
GWKKWLRKGAKHLGQAAIK

SEQ ID NO: 2571 - protein, 23 aa, Artificial
  Peptide with targeting and/or antimicrobial activity
GWKKWLRKGAKHLGQAAIKGLAS

SEQ ID NO: 2572 - protein, 24 aa, Artificial
  Peptide with targeting and/or antimicrobial activity
FLGLLFHGVHHVGKWIHGLIHGHH

SEQ ID NO: 2573 - protein, 20 aa, Artificial
  Peptide with targeting and/or antimicrobial activity
IIGPVLGLVGSALGGLLKKI

SEQ ID NO: 2574 - protein, 20 aa, Artificial
  Peptide with targeting and/or antimicrobial activity
IIGPVLGMVGSALGGLLKKI

SEQ ID NO: 2575 - protein, 17 aa, Artificial
  Peptide with targeting and/or antimicrobial activity
ILGPILGLVSNALGGLL

SEQ ID NO: 2576 - protein, 18 aa, Artificial
  Peptide with targeting and/or antimicrobial activity
IIGPVLGLVGKPLESLLE

SEQ ID NO: 2577 - protein, 18 aa, Artificial
  Peptide with targeting and/or antimicrobial activity
IIGPVLGLVGKPLESLLE

SEQ ID NO: 2578 - protein, 62 aa, Artificial
  Peptide with targeting and/or antimicrobial activity
NRWYCNSAAGGVGGAAGCVLAGYVGEAKENIAGEVRKGWGMAGGFTHNKACKSFPGSGWASG

SEQ ID NO: 2579 - protein, 20 aa, Artificial
  Peptide with targeting and/or antimicrobial activity
CRFCCRCCPRMRGCGLCCRF

SEQ ID NO: 2580 - protein, 22 aa, Artificial
  Peptide with targeting and/or antimicrobial activity
GIKCRFCCGCCTPGICGVCCRF

SEQ ID NO: 2581 - protein, 20 aa, Artificial
  Peptide with targeting and/or antimicrobial activity
QSHLSLCRWCCNCCRSNKGC

SEQ ID NO: 2582 - protein, 40 aa, Artificial
  Peptide with targeting and/or antimicrobial activity
MTPFWRGVSLRPIGASCRDDSECITRLCRKRRCSLSVAQE

SEQ ID NO: 2583 - protein, 29 aa, Artificial
  Peptide with targeting and/or antimicrobial activity
FAEPLPSEEEGESYSKEPPEMEKRYGGFM

SEQ ID NO: 2584 - protein, 38 aa, Artificial
  Peptide with targeting and/or antimicrobial activity
SFGLCRLRRGSCAHGRCRFPSIPIGRCSRFVQCCRRVW

SEQ ID NO: 2585 - protein, 37 aa, Artificial
  Peptide with targeting and/or antimicrobial activity
LLGDFFRKAREKIGEEFKRIVQRIKDFLRNLVPRTES

SEQ ID NO: 2586 - protein, 37 aa, Artificial
  Peptide with targeting and/or antimicrobial activity
SLGNFFRKARKKIGEEFKRIVQRIKDFLQHLIPRTEA

SEQ ID NO: 2587 - protein, 37 aa, Artificial
  Peptide with targeting and/or antimicrobial activity
RLGNFFRKAKKKIGRGLKKIGQKIKDFLGNLVPRTES

SEQ ID NO: 2588 - protein, 37 aa, Artificial
  Peptide with targeting and/or antimicrobial activity
RLGDILQKAREKIEGGLKKLVQKIKDFFGKFAPRTES

SEQ ID NO: 2589 - protein, 23 aa, Artificial
  Peptide with targeting and/or antimicrobial activity
GLVTSLIKGAGKLLGGLFGSVTG

SEQ ID NO: 2590 - protein, 23 aa, Artificial
  Peptide with targeting and/or antimicrobial activity
GLVTGLLKTAGKLLGDLFGSLTG

SEQ ID NO: 2591 - protein, 23 aa, Artificial
  Peptide with targeting and/or antimicrobial activity
GVVTDLLKTAGKLLGNLFGSLSG

SEQ ID NO: 2592 - protein, 23 aa, Artificial
  Peptide with targeting and/or antimicrobial activity
GVVTDLLKTAGKLLGNLVGSLSG

SEQ ID NO: 2593 - protein, 94 aa, Artificial
  Peptide with targeting and/or antimicrobial activity
PITYLDAILAAVRLLNQRISGPCILRLREAQPRPGWVGTLQRRREVSFLVEDGPCPPGVDCRSCEPGALQHCVGTVSIEQQPTAELRCRPLRPQ

SEQ ID NO: 2594 - protein, 67 aa, Artificial
  Peptide with targeting and/or antimicrobial activity
MRILYLLLSVLFVVLQGVAGQPYFSSPIHACRYQRGVCIPGPCRWPYYRVGSCGSGLKSCCVRNRWA

SEQ ID NO: 2595 - protein, 62 aa, Artificial
  Peptide with targeting and/or antimicrobial activity
MKILCFFIVLFVAVHGAVGFSRSPRYHMQCGYRGTFCTPGKCPYGNAYLGLCRPKYSCCRWL

SEQ ID NO: 2596 - protein, 66 aa, Artificial
  Peptide with targeting and/or antimicrobial activity
MQILPLLFAVLLLMLRAEPGLSLARGLPQDCERRGGFCSHKSCPPGIGRIGLCSKEDFCCRSRWYS

SEQ ID NO: 2597 - protein, 40 aa, Artificial
  Peptide with targeting and/or antimicrobial activity
MTPFWRGVSLRPVGASCRDNSECITMLCRKNRCFLRTASE

SEQ ID NO: 2598 - protein, 31 aa, Artificial
  Peptide with targeting and/or antimicrobial activity
GLGSILGKILNVAGKVGKTIGKVADAVGNKE

SEQ ID NO: 2599 - protein, 31 aa, Artificial
  Peptide with targeting and/or antimicrobial activity
GLGSFLKNAIKIAGKVGSTIGKVADAIGNKE

SEQ ID NO: 2600 - protein, 31 aa, Artificial
  Peptide with targeting and/or antimicrobial activity
GLGSFFKNAIKIAGKVGSTIGKVADAIGNKE

SEQ ID NO: 2601 - protein, 13 aa, Artificial
  Peptide with targeting and/or antimicrobial activity
FLPLLASLFSRLL

SEQ ID NO: 2602 - protein, 13 aa, Artificial
  Peptide with targeting and/or antimicrobial activity
FLPLIGKILGTIL

SEQ ID NO: 2603 - protein, 13 aa, Artificial
  Peptide with targeting and/or antimicrobial activity
FLPLLASLFSRLF

SEQ ID NO: 2604 - protein, 13 aa, Artificial
  Peptide with targeting and/or antimicrobial activity
FLPLLASLFSGLF

SEQ ID NO: 2605 - protein, 32 aa, Artificial
  Peptide with targeting and/or antimicrobial activity
GLFNVFKGLKTAGKHVAGSLLNQLKCKVSGGC

SEQ ID NO: 2606 - protein, 33 aa, Artificial
  Peptide with targeting and/or antimicrobial activity
GIFNVFKGALKTAGKHVAGSLLNQLKCKVSGEC

SEQ ID NO: 2607 - protein, 14 aa, Artificial
  Peptide with targeting and/or antimicrobial activity
SILPTIVSFLSKFL

SEQ ID NO: 2608 - protein, 14 aa, Artificial
  Peptide with targeting and/or antimicrobial activity
SILPTIVSFLTKFL

SEQ ID NO: 2609 - protein, 14 aa, Artificial
  Peptide with targeting and/or antimicrobial activity
FILPLIASFLSKFL

SEQ ID NO: 2610 - protein, 25 aa, Artificial
  Peptide with targeting and/or antimicrobial activity
SMISVLKNLGKVGLGFVACKVNKQC

SEQ ID NO: 2611 - protein, 20 aa, Artificial
  Peptide with targeting and/or antimicrobial activity
FLGGLMKIIPAAFCAVTKKC

SEQ ID NO: 2612 - protein, 31 aa, Artificial
  Peptide with targeting and/or antimicrobial activity
GLLLDTLKGAAKDIAGIALEKLKCKITGCKP

SEQ ID NO: 2613 - protein, 23 aa, Artificial
  Peptide with targeting and/or antimicrobial activity
GLLSGILGAGKHIVCGLTGCAKA

SEQ ID NO: 2614 - protein, 20 aa, Artificial
  Peptide with targeting and/or antimicrobial activity
ILGPVISTIGGVLGGLLKNL

SEQ ID NO: 2615 - protein, 39 aa, Artificial
  Peptide with targeting and/or antimicrobial activity
KVNANAIKKGGKAIGKGFKVISAASTAHDVYEHIKNRRH

SEQ ID NO: 2616 - protein, 43 aa, Artificial
  Peptide with targeting and/or antimicrobial activity
GKIPVKAIKKGGQIIGKALRGINIASTAHDIISQFKPKKKKNH

SEQ ID NO: 2617 - protein, 38 aa, Artificial
  Peptide with targeting and/or antimicrobial activity
KVPIGAIKKGGKIIKKGLGVIGAAGTAHEVYSHVKNRH

SEQ ID NO: 2618 - protein, 38 aa, Artificial
  Peptide with targeting and/or antimicrobial activity
KVPIGAIKKGGKIIKKGLGVLGAAGTAHEVYNHVRNRQ

SEQ ID NO: 2619 - protein, 38 aa, Artificial
  Peptide with targeting and/or antimicrobial activity
KVPIGAIKKGGKIIKKGLGVIGAAGTAHEVYSHVKNRQ

SEQ ID NO: 2620 - protein, 38 aa, Artificial
  Peptide with targeting and/or antimicrobial activity
KVPVGAIKKGGKAIKTGLGVVGAAGTAHEVYSHIRNRH

SEQ ID NO: 2621 - protein, 38 aa, Artificial
  Peptide with targeting and/or antimicrobial activity
KGIGSALKKGGKIIKGGLGALGAIGTGQQVYEHVQNRQ

SEQ ID NO: 2622 - protein, 47 aa, Artificial
  Peptide with targeting and/or antimicrobial activity
TTHSGKYYGNGVYCTKNKCTVDWAKATTCIAGMSIGGFLGGAIPGKC

SEQ ID NO: 2623 - protein, 43 aa, Artificial
  Peptide with targeting and/or antimicrobial activity
TKYYGNGVYCNSKKCWVDWGQASGCIGQTVVGGWLGGAIPGKC

SEQ ID NO: 2624 - protein, 43 aa, Artificial
  Peptide with targeting and/or antimicrobial activity
TKYYGNGVYCNSKKCWVDWGTAQGCIDVVIGQLGGGIPGKGKC

SEQ ID NO: 2625 - protein, 44 aa, Artificial
  Peptide with targeting and/or antimicrobial activity
KYYGNGVTCGKHSCSVDWGKATTCIINNGAMAWATGGHQGTHKC

SEQ ID NO: 2626 - protein, 43 aa, Artificial
  Peptide with targeting and/or antimicrobial activity
KSYGNGVHCNKKKCWVDWGSAISTIGNNSAANWATGGAAGWKS

SEQ ID NO: 2627 - protein, 43 aa, Artificial
  Peptide with targeting and/or antimicrobial activity
KYYGNGVSCNKKGCSVDWGKAIGIIGNNSAANLATGGAAGWKS

SEQ ID NO: 2628 - protein, 43 aa, Artificial
  Peptide with targeting and/or antimicrobial activity
KYYGNGLSCNKSGCSVDWSKAISIIGNNAVANLTTGGAAGWKS

SEQ ID NO: 2629 - protein, 43 aa, Artificial
  Peptide with targeting and/or antimicrobial activity
KNYGNGVHCTKKGCSVDWGYAWANIANNSVMNGLTGGNAGWHN

SEQ ID NO: 2630 - protein, 37 aa, Artificial
  Peptide with targeting and/or antimicrobial activity
TSYGNGVHCNKSKCWIDVSELETYKAGTVSNPKDILW

SEQ ID NO: 2631 - protein, 37 aa, Artificial
  Peptide with targeting and/or antimicrobial activity
KYYGNGVSCNSHGCSVNWGQAWTCGVNHLANGGHGVC

SEQ ID NO: 2632 - protein, 37 aa, Artificial
  Peptide with targeting and/or antimicrobial activity
KYYGNGVTCGKHSCSVNWGQAFSCSVSHLANFGHGKC

SEQ ID NO: 2633 - protein, 37 aa, Artificial
  Peptide with targeting and/or antimicrobial activity
KYYGNGLSCSKKGCTVNWGQAFSCGVNRVATAGHHKC

SEQ ID NO: 2634 - protein, 44 aa, Artificial
  Peptide with targeting and/or antimicrobial activity
ATRSYGNGVYCNNSKCWVNWGEAKENIAGIVISGWASGLAGMGH

SEQ ID NO: 2635 - protein, 43 aa, Artificial
  Peptide with targeting and/or antimicrobial activity
ATYYGNGLYCNKQKCWVDWNKASREIGKIIVNGWVQHGPWAPR

SEQ ID NO: 2636 - protein, 22 aa, Artificial
  Peptide with targeting and/or antimicrobial activity
GIGKFLKKAKKFGKAFVKILKK

SEQ ID NO: 2637 - protein, 24 aa, Artificial
  Peptide with targeting and/or antimicrobial activity
GIGKFLKKAKKGIGAVLKVLTTGL

SEQ ID NO: 2638 - protein, 21 aa, Artificial
  Peptide with targeting and/or antimicrobial activity
SSMKLSFRARAYGFRGPGPQL

SEQ ID NO: 2639 - protein, 13 aa, Artificial
  Peptide with targeting and/or antimicrobial activity
LLPIVGNLLNSLL

SEQ ID NO: 2640 - protein, 10 aa, Artificial
  Peptide with targeting and/or antimicrobial activity
LSPNLLKSLL

SEQ ID NO: 2641 - protein, 24 aa, Artificial
  Peptide with targeting and/or antimicrobial activity
FLPLAVSLAANFLPKLFCKITKKC

SEQ ID NO: 2642 - protein, 24 aa, Artificial
  Peptide with targeting and/or antimicrobial activity
FLPLLAGLAANFLPKIFCKITKRC

SEQ ID NO: 2643 - protein, 16 aa, Artificial
  Peptide with targeting and/or antimicrobial activity
FLPIVGKLLSGLSGLL

SEQ ID NO: 2644 - protein, 13 aa, Artificial
  Peptide with targeting and/or antimicrobial activity
FLPIVGRLISGLL

SEQ ID NO: 2645 - protein, 13 aa, Artificial
  Peptide with targeting and/or antimicrobial activity
FLPIIGQLLSGLL

SEQ ID NO: 2646 - protein, 13 aa, Artificial
  Peptide with targeting and/or antimicrobial activity
FLPIIAKVLSGLL

SEQ ID NO: 2647 - protein, 13 aa, Artificial
  Peptide with targeting and/or antimicrobial activity
FLPVIAGLLSKLF

SEQ ID NO: 2648 - protein, 13 aa, Artificial
  Peptide with targeting and/or antimicrobial activity
ILPLVGNLLNDLL

SEQ ID NO: 2649 - protein, 13 aa, Artificial
  Peptide with targeting and/or antimicrobial activity
ILPILGNLLNGLL

SEQ ID NO: 2650 - protein, 13 aa, Artificial
  Peptide with targeting and/or antimicrobial activity
FLPLVGKILSGLI

SEQ ID NO: 2651 - protein, 13 aa, Artificial
  Peptide with targeting and/or antimicrobial activity
FLSSIGKILGNLL

SEQ ID NO: 2652 - protein, 13 aa, Artificial
  Peptide with targeting and/or antimicrobial activity
FLSIIAKVLGSLF

SEQ ID NO: 2653 - protein, 21 aa, Artificial
  Peptide with targeting and/or antimicrobial activity
FLGSLIGAAIPAIKQLLGLKK

SEQ ID NO: 2654 - protein, 24 aa, Artificial
  Peptide with targeting and/or antimicrobial activity
FLPILASLAAKFGPKLFCLVTKKC

SEQ ID NO: 2655 - protein, 32 aa, Artificial
  Peptide with targeting and/or antimicrobial activity
QLKVDLWGTRSGIQPEQHSSGKSDVRRWRSRY

SEQ ID NO: 2656 - protein, 24 aa, Artificial
  Peptide with targeting and/or antimicrobial activity
FLPILASLAAKLGPKLFCLVTKKC

SEQ ID NO: 2657 - protein, 24 aa, Artificial
  Peptide with targeting and/or antimicrobial activity
FLPILASLAATLGPKLLCLITKKC

SEQ ID NO: 2658 - protein, 32 aa, Artificial
  Peptide with targeting and/or antimicrobial activity
GILSTFKGLAKGVAKDLAGNLLDKFKCKITGC

SEQ ID NO: 2659 - protein, 28 aa, Artificial
  Peptide with targeting and/or antimicrobial activity
GIMDSVKGLAKNLAGKLLDSLKCKITGC

SEQ ID NO: 2660 - protein, 24 aa, Artificial
  Peptide with targeting and/or antimicrobial activity
IIGLVSKGTCVLVKTVCKKVLKQG

SEQ ID NO: 2661 - protein, 36 aa, Artificial
  Peptide with targeting and/or antimicrobial activity
PDITKLNIKKLTKATCKVISKGASMCKVLFDKKKQE

SEQ ID NO: 2662 - protein, 37 aa, Artificial
  Peptide with targeting and/or antimicrobial activity
DVKGMKKAIKGILDCVIEKGYDKLAAKLKKVIQQLWE

SEQ ID NO: 2663 - protein, 21 aa, Artificial
  Peptide with targeting and/or antimicrobial activity
GLLDFVTGVGKDIFAQLIKQI

SEQ ID NO: 2664 - protein, 34 aa, Artificial
  Peptide with targeting and/or antimicrobial activity
KRFKKFFKKLKNSVKKRAKKFFKKPRVIGVSIPF

SEQ ID NO: 2665 - protein, 34 aa, Artificial
  Peptide with targeting and/or antimicrobial activity
KRFKKFFKKLKKSVKKRAKKFFKKPRVIGVSIPF

SEQ ID NO: 2666 - protein, 34 aa, Artificial
  Peptide with targeting and/or antimicrobial activity
KRFKKFFKKLKNSVKKRAKKFFKKPKVIGVTFPF

SEQ ID NO: 2667 - protein, 13 aa, Artificial
  Peptide with targeting and/or antimicrobial activity
FLSGIVGMLGKLF

SEQ ID NO: 2668 - protein, 13 aa, Artificial
  Peptide with targeting and/or antimicrobial activity
FLPIVTNLLSGLL

SEQ ID NO: 2669 - protein, 13 aa, Artificial
  Peptide with targeting and/or antimicrobial activity
FLSHIAGFLSNLF

SEQ ID NO: 2670 - protein, 20 aa, Artificial
  Peptide with targeting and/or antimicrobial activity
EWGRRCCGWGPGRRYCVRWC

SEQ ID NO: 2671 - protein, 20 aa, Artificial
  Peptide with targeting and/or antimicrobial activity
QYGRRCCNWGPGRRYCKRWC

SEQ ID NO: 2672 - protein, 45 aa, Artificial
  Peptide with targeting and/or antimicrobial activity
QQCGRQAGNRRCANNLCCSQYGYCGRTNEYCCTSQGCQSQCRRCG

SEQ ID NO: 2673 - protein, 38 aa, Artificial
  Peptide with targeting and/or antimicrobial activity
AGCIKNGGRCNASAGPPYCCSSYCFQIAGQSYGVCKNR

SEQ ID NO: 2674 - protein, 37 aa, Artificial
  Peptide with targeting and/or antimicrobial activity
ACIKNGGRCVASGGPPYCCSNYCLQIAGQSYGVCKKH

SEQ ID NO: 2675 - protein, 37 aa, Artificial
  Peptide with targeting and/or antimicrobial activity
GYGCPFNQYQCHSHCRGIRGYKGGYCTGRFKQTCKCY

SEQ ID NO: 2676 - protein, 37 aa, Artificial
  Peptide with targeting and/or antimicrobial activity
GYGCPFNQYQCHSHCSGIRGYKGGYCKGLFKQTCNCY

SEQ ID NO: 2677 - protein, 37 aa, Artificial
  Peptide with targeting and/or antimicrobial activity
GFGCPFNQYECHAHCSGVPGYKGGYCKGLFKQTCNCY

SEQ ID NO: 2678 - protein, 58 aa, Artificial
  Peptide with targeting and/or antimicrobial activity
IYFIADKMGIQLAPAWYQDIVNWVSAGGTLTTGFAIIVGVTVPAWIAEAAAAFGIASA

SEQ ID NO: 2679 - protein, 80 aa, Artificial
  Peptide with targeting and/or antimicrobial activity
ASLQFLPIAHMAKEFGIPAAVAGTVINVVEAGGWVTTIVSILTAVGSGGLSLLAAAGRESIKAYLKKEIKKKGKRAVIAW

SEQ ID NO: 2680 - protein, 58 aa, Artificial; identical to SEQ ID NO: 2547
  Peptide with targeting and/or antimicrobial activity

SEQ ID NO: 2681 - protein, 70 aa, Artificial
  Peptide with targeting and/or antimicrobial activity
LAGYTGIASGTAKKVVDAIDKGAAAFVIISIISTVISAGALGAVSASADFIILTVKNYISRNLKAQAVIW

SEQ ID NO: 2682 - protein, 58 aa, Artificial
  Peptide with targeting and/or antimicrobial activity
IYWIADQFGIHLATGTARKLLDAVASGASLGTAFAAILGVTLPAWALAAAGALGATAA

SEQ ID NO: 2683 - protein, 40 aa, Artificial
  Peptide with targeting and/or antimicrobial activity
ATCDLLSGTGINHSACAAHCLLRGNRGGYCNRKGVCVCRN

SEQ ID NO: 2684 - protein, 19 aa, Artificial
  Peptide with targeting and/or antimicrobial activity
RNCESLSHRFKGPCTRDSN

SEQ ID NO: 2685 - protein, 63 aa, Artificial
  Peptide with targeting and/or antimicrobial activity
GSNFCDSKCKLRCSKAGLADRCLKYCGICCEECKCVPSGTYGNKHECPCYRDKKNSKGKSKCP

SEQ ID NO: 2686 - protein, 66 aa, Artificial
  Peptide with targeting and/or antimicrobial activity
YSYKKIDCGGACAARCRLSSRPRLCNRACGTCCARCNCVPPGTSGNTETCPCYASLTTHGNKRKCP

SEQ ID NO: 2687 - protein, 52 aa, Artificial
  Peptide with targeting and/or antimicrobial activity
GIFSSRKCKTPSKTFKGICTRDSNCDTSCRYEGYPAGDCKGIRRRCMCSKPC

SEQ ID NO: 2688 - protein, 18 aa, Artificial
  Peptide with targeting and/or antimicrobial activity
GIFSNMYARTPAGYFRGP

SEQ ID NO: 2689 - protein, 34 aa, Artificial
  Peptide with targeting and/or antimicrobial activity
ITSISLCTPGCKTGVLMGCNLKTATCNCSVHVSK

SEQ ID NO: 2690 - protein, 44 aa, Artificial
  Peptide with targeting and/or antimicrobial activity
YSRCQLQGFNCVVRSYGLPTIPCCRGLTCRSYFPGSTYGRCQRF

SEQ ID NO: 2691 - protein, 41 aa, Artificial
  Peptide with targeting and/or antimicrobial activity
DYDWSLRGPPKCATYGQKCRTWSPRNCCWNLRCKAFRCRPR

SEQ ID NO: 2692 - protein, 20 aa, Artificial
  Peptide with targeting and/or antimicrobial activity
SWKSMAKKLKEYMEKLKQRA

SEQ ID NO: 2693 - protein, 20 aa, Artificial
  Peptide with targeting and/or antimicrobial activity
SWASMAKKLKEYMEKLKQRA

SEQ ID NO: 2694 - protein, 24 aa, Artificial
  Peptide with targeting and/or antimicrobial activity
GLKDKFKSMGEKLKQYIQTWKAKF

SEQ ID NO: 2695 - protein, 24 aa, Artificial
  Peptide with targeting and/or antimicrobial activity
SLKDKVKSMGEKLKQYIQTWKAKF

SEQ ID NO: 2696 - protein, 28 aa, Artificial
  Peptide with targeting and/or antimicrobial activity
GFFGKMKEYFKKFGASFKRRFANLKKRL

SEQ ID NO: 2697 - protein, 33 aa, Artificial
  Peptide with targeting and/or antimicrobial activity
QAFQTFKPDWNKIRYDAMKMQTSLGQMKKRFNL

SEQ ID NO: 2698 - protein, 34 aa, Artificial
  Peptide with targeting and/or antimicrobial activity
GETFDKLKEKLKTFYQKLVEKAEDLKGDLKAKLS

SEQ ID NO: 2699 - protein, 29 aa, Artificial
  Peptide with targeting and/or antimicrobial activity
VCGETCFGGTCNTPGCSCTWPICTRDGLP

SEQ ID NO: 2700 - protein, 35 aa, Artificial; identical to SEQ ID NO: 1957
  Peptide with targeting and/or antimicrobial activity

SEQ ID NO: 2701 - protein, 34 aa, Artificial
  Peptide with targeting and/or antimicrobial activity
KPYCSCKWRCGIGEEEKGICHKFPIVTYVCCRRP

SEQ ID NO: 2702 - protein, 41 aa, Artificial
  Peptide with targeting and/or antimicrobial activity
DTLACRQSHGSCSFVACRAPSVDIGTCRGGKLKCCKWAPSS

SEQ ID NO: 2703 - protein, 41 aa, Artificial
  Peptide with targeting and/or antimicrobial activity
DTVACRIQGNFCRAGACPPTFTISGQCHGGLLNCCAKIPAQ

SEQ ID NO: 2704 - protein, 38 aa, Artificial
  Peptide with targeting and/or antimicrobial activity
IATQCRIRGGFCRVGSCRFPHIAIGKCATFISCCGRAY

SEQ ID NO: 2705 - protein, 39 aa, Artificial
  Peptide with targeting and/or antimicrobial activity
SIWGDIGQGVGKAAYWVGKAMGNMSDVNQASRINRKKKH

SEQ ID NO: 2706 - protein, 39 aa, Artificial
  Peptide with targeting and/or antimicrobial activity
ESVFSKIGNAVGPAAYWILKGLGNMSDVNQADRINRKKH

SEQ ID NO: 2707 - protein, 26 aa, Artificial
  Peptide with targeting and/or antimicrobial activity
NKLAYNMGHYAGKATIFGLAAWALLA

SEQ ID NO: 2708 - protein, 37 aa, Artificial
  Peptide with targeting and/or antimicrobial activity
KWKIFKKIEHMGQNIRDGLIKAGPAVQVVGQAATIYK

SEQ ID NO: 2709 - protein, 27 aa, Artificial
  Peptide with targeting and/or antimicrobial activity
KILRGLCKKIMRSFLRRISWDILTGKK

SEQ ID NO: 2710 - protein, 28 aa, Artificial
  Peptide with targeting and/or antimicrobial activity
LTTKLWSSWGYYLGKKARWNLKHPYVQF

SEQ ID NO: 2711 - protein, 60 aa, Artificial
  Peptide with targeting and/or antimicrobial activity
LVAYGIAQGTAEKVVSLINAGLTVGSIISILGGVTVGLSGVFTAVKAAIAKQGIKKAIQL

SEQ ID NO: 2712 - protein, 48 aa, Artificial
  Peptide with targeting and/or antimicrobial activity
NRWGDTVLSAASGAGTGIKACKSFGPWGMAICGVGGAAIGGYFGYTHN

SEQ ID NO: 2713 - protein, 59 aa, Artificial
  Peptide with targeting and/or antimicrobial activity
YSSKDCLKDIGKGIGAGTVAGAAGGGLAAGLGAIPGAFVGAHFGVIGGSAACIGGLLGN

SEQ ID NO: 2714 - protein, 62 aa, Artificial
  Peptide with targeting and/or antimicrobial activity
YSGKDCLKDMGGYALAGAGSGALWGAPAGGVGALPGAFVGAHVGAIAGGFACMGGMIGNKFN

SEQ ID NO: 2715 - protein, 45 aa, Artificial
  Peptide with targeting and/or antimicrobial activity
KRGPNCVGNFLGGLFAGAAAGVPLGPAGIVGGANLGMVGGALTCL

SEQ ID NO: 2716 - protein, 45 aa, Artificial; identical to SEQ ID NO: 2715
  Peptide with targeting and/or antimicrobial activity

SEQ ID NO: 2717 - protein, 44 aa, Artificial
  Peptide with targeting and/or antimicrobial activity
KVSGGEAVAAIGICATASAAIGGLAGATLVTPYCVGTWGLIRSH

SEQ ID NO: 2718 - protein, 33 aa, Artificial
  Peptide with targeting and/or antimicrobial activity
GMSGYIQGIPDFLKGYLHGISAANKHKKGRLGY

SEQ ID NO: 2719 - protein, 21 aa, Artificial
  Peptide with targeting and/or antimicrobial activity
TTPACFTIGLGVGALFSAKFC

SEQ ID NO: 2720 - protein, 30 aa, Artificial
  Peptide with targeting and/or antimicrobial activity
FNRGGYNFGKSVRHVVDAIGSVAGILKSIR

SEQ ID NO: 2721 - protein, 25 aa, Artificial
  Peptide with targeting and/or antimicrobial activity
GAWKNFWSSLRKGFYDGEAGRAIRR

SEQ ID NO: 2722 - protein, 43 aa, Artificial
  Peptide with targeting and/or antimicrobial activity
NGVYCNKQKCWVDWSRARSEIIDRGVKAYVNGFTKVLGGIGGR

SEQ ID NO: 2723 - protein, 23 aa, Artificial
  Peptide with targeting and/or antimicrobial activity
NPKVAHCASQIGRSTAWGAVSGA

SEQ ID NO: 2724 - protein, 30 aa, Artificial
  Peptide with targeting and/or antimicrobial activity
AYPGNGVHCGKYSCTVDKQTAIGNIGNNAA

SEQ ID NO: 2725 - protein, 70 aa, Artificial
  Peptide with targeting and/or antimicrobial activity
FTPSVSFSQNGGVVEAAAQRGYIYKKYPKGAKVPNKVKMLVNIRGKQTMRTCYLMSWTASSRTAKYYYYI

SEQ ID NO: 2726 - protein, 44 aa, Artificial
  Peptide with targeting and/or antimicrobial activity
ATYYGNGLYCNKEKCWVDWNQAKGEIGKIIVNGWVNHGPWAPRR

SEQ ID NO: 2727 - protein, 44 aa, Artificial; identical to SEQ ID NO: 2726
  Peptide with targeting and/or antimicrobial activity

SEQ ID NO: 2728 - protein, 53 aa, Artificial
  Peptide with targeting and/or antimicrobial activity
ENDHRMPNNLNRPNNLSKGGAKCGAAIAGGLFGIPKGPLAWAAGLANVYSKCN

SEQ ID NO: 2729 - protein, 58 aa, Artificial
  Peptide with targeting and/or antimicrobial activity
KTYYGTNGVHCTKKSLWGKVRLKNVIPGTLCRKQSLPIKQDLKILLGWATGAFGKTFH

SEQ ID NO: 2730 - protein, 34 aa, Artificial
  Peptide with targeting and/or antimicrobial activity
MNFLKNGIAKWMTGAELQAYKKKYGCLPWEKISC

SEQ ID NO: 2731 - protein, 44 aa, Artificial
  Peptide with targeting and/or antimicrobial activity
MLAKIKAMIKKFPNPYTLAAKLTTYEINWYKQQYGRYPWERPVA

SEQ ID NO: 2732 - protein, 44 aa, Artificial
  Peptide with targeting and/or antimicrobial activity
APAGLVAKFGRPIVKKYYKQIMQFIGEGSAINKIIPWIARMWRT

SEQ ID NO: 2733 - protein, 44 aa, Artificial
  Peptide with targeting and/or antimicrobial activity
MGAIAKLVAKFGWPIVKKYYKQIMQFIGEGWAINKIIEWIKKHI

SEQ ID NO: 2734 - protein, 44 aa, Artificial
  Peptide with targeting and/or antimicrobial activity
MGAIAKLVAKFGWPIVKKYYKQIMQFIGEGWAINKIIDWIKKHI

SEQ ID NO: 2735 - protein, 36 aa, Artificial
  Peptide with targeting and/or antimicrobial activity
SDCNINSNTAADVILCFNQVGSCALCSPTLVGGPVP

SEQ ID NO: 2736 - protein, 76 aa, Artificial
  Peptide with targeting and/or antimicrobial activity
DIDITGCSACKYAAGQVCTIGCSAAGGFICGLLGITIPVAGLSCLGFVEIVCTVADEYSGCGDAVAKEACNRAGLC

SEQ ID NO: 2737 - protein, 30 aa, Artificial
  Peptide with targeting and/or antimicrobial activity
CSTNTFSLSDYWGNNGAWCTLTHECMAWCK

SEQ ID NO: 2738 - protein, 22 aa, Artificial
  Peptide with targeting and/or antimicrobial activity
KRGSGWIATITDDCPNSVFVCC

SEQ ID NO: 2739 - protein, 44 aa, Artificial; identical to SEQ ID NO: 2726
  Peptide with targeting and/or antimicrobial activity

SEQ ID NO: 2740 - protein, 44 aa, Artificial; identical to SEQ ID NO: 2726
  Peptide with targeting and/or antimicrobial activity

SEQ ID NO: 2741 - protein, 35 aa, Artificial
  Peptide with targeting and/or antimicrobial activity
LSCDEGMLAVGGLGAVGGPWGAAVGVLVGAALYCF

SEQ ID NO: 2742 - protein, 42 aa, Artificial
  Peptide with targeting and/or antimicrobial activity
KYYGNGVHCGKKTCYVDWGQATASIGKIIVNGWTQHGPWAHR

SEQ ID NO: 2743 - protein, 25 aa, Artificial
  Peptide with targeting and/or antimicrobial activity
GGGVIQTISHECRMNSWQFLFTCCS

SEQ ID NO: 2744 - protein, 27 aa, Artificial
  Peptide with targeting and/or antimicrobial activity
KGGSGVIHTISHECNMNSWQFVFTCCS

SEQ ID NO: 2745 - protein, 27 aa, Artificial
  Peptide with targeting and/or antimicrobial activity
KGGSGVIHTISHEVIYNSWNFVFTCCS

SEQ ID NO: 2746 - protein, 27 aa, Artificial
  Peptide with targeting and/or antimicrobial activity
KKKSGVIPTVSHDCHMNSFQFVFTCCS

SEQ ID NO: 2747 - protein, 26 aa, Artificial
  Peptide with targeting and/or antimicrobial activity
GKNGVFKTISHECHLNTWAFLATCCS

SEQ ID NO: 2748 - protein, 8 aa, Artificial
  Peptide with targeting and/or antimicrobial activity
PFKLSLHL

SEQ ID NO: 2749 - protein, 9 aa, Artificial
  Peptide with targeting and/or antimicrobial activity
TPFKLSLHL

SEQ ID NO: 2750 - protein, 9 aa, Artificial
  Peptide with targeting and/or antimicrobial activity
EPFKLSLHL

SEQ ID NO: 2751 - protein, 93 aa, Artificial
  Peptide with targeting and/or antimicrobial activity
EFRGSIVIQGTKEGKSRPSLDIDYKQRVYDKNGMTGDAYGGLNIRPGQPSRQHAGFEFGKEYKNGFIKGQSEVQRGPGGRLSPYFGINGGFRF

SEQ ID NO: 2752 - protein, 23 aa, Artificial
  Peptide with targeting and/or antimicrobial activity
GFRDVLKGAAKAFVKTVAGHIAN

SEQ ID NO: 2753 - protein, 24 aa, Artificial
  Peptide with targeting and/or antimicrobial activity
GFRDVLKGAAKAFVKTVAGHIANI

SEQ ID NO: 2754 - protein, 24 aa, Artificial
  Peptide with targeting and/or antimicrobial activity
GIKDWIKGAAKKLIKTVASNIANQ

SEQ ID NO: 2755 - protein, 24 aa, Artificial
  Peptide with targeting and/or antimicrobial activity
GFKDWIKGAAKKLIKTVASSIANQ

SEQ ID NO: 2756 - protein, 19 aa, Artificial
  Peptide with targeting and/or antimicrobial activity
GFKDLLKGAAKALVKTVLF

SEQ ID NO: 2757 - protein, 7 aa, Artificial
  Peptide with targeting and/or antimicrobial activity
MRTGNAD

SEQ ID NO: 2758 - protein, 43 aa, Artificial
  Peptide with targeting and/or antimicrobial activity
VGIGGGGGGGGGGSCGGQGGGCGGCSNGCSGGNGGSGGSGSHI

SEQ ID NO: 2759 - protein, 88 aa, Artificial
  Peptide with targeting and/or antimicrobial activity
ASGRDIAMAIGTLSGQFVAGGIGAAAGGVAGGAIYDYASTHKPNPAMSPSGLGGTIKQKPEGIPSEAWNYAAGRLCNWSPNNLSDVCL

SEQ ID NO: 2760 - protein, 90 aa, Artificial
  Peptide with targeting and/or antimicrobial activity
GDVNWVDVGKTVATNGAGVIGGAFGAGLCGPVCAGAFAVGSSAAVAALYDAAGNSNSAKQKPEGLPPEAWNYAEGRMCNWSPNNLSDVCL

SEQ ID NO: 2761 - protein, 77 aa, Artificial
  Peptide with targeting and/or antimicrobial activity
DGNDGQAELIAIGSLAGTFISPGFGSIAGAYIGDKVHSWATTATVSPSMSPSGIGLSSQFGSGRGTSSASSSAGSGS

SEQ ID NO: 2762 - protein, 60 aa, Artificial
  Peptide with targeting and/or antimicrobial activity
GGAPATSANAAGAAAIVGALAGIPGGPLGVVVGAVSAGLTTGIGSTVGSGSASSSAGGGS

SEQ ID NO: 2763 - protein, 62 aa, Artificial
  Peptide with targeting and/or antimicrobial activity
MNLNGLPASTNVIDLRGKDMGTYIDANGACWAPDTPSIIMYPGGSGPSYSMSSSTSSANSGS

SEQ ID NO: 2764 - protein, 19 aa, Artificial
  Peptide with targeting and/or antimicrobial activity
  mod_res (1)..(1): Xaa is Aib
  mod_res (3)..(3): Xaa is Aib
  mod_res (5)..(5): Xaa is Aib
  mod_res (8)..(8): Xaa is Aib
  mod_res (10)..(10): Xaa is Aib
  mod_res (12)..(13): Xaa is Aib
  mod_res (16)..(17): Xaa is Aib
XAXAXAQXFXGXXPVXXEE

SEQ ID NO: 2765 - protein, 20 aa, Artificial
  Peptide with targeting and/or antimicrobial activity
  mod_res (1)..(1): Aib
  mod_res (3)..(3): Aib
  mod_res (5)..(5): Aib
  mod_res (8)..(8): Aib
  mod_res (10)..(10): Aib
  mod_res (13)..(13): Aib
  mod_res (16)..(17): Aib
XPXAXAQXVXGLXPVXXEQF

SEQ ID NO: 2766 - protein, 20 aa, Artificial
  Peptide with targeting and/or antimicrobial activity
  mod_res (1)..(1): Aib
  mod_res (3)..(3): Aib
  mod_res (5)..(5): Aib
  mod_res (8)..(8): Aib
  mod_res (10)..(10): Aib
  mod_res (13)..(13): Aib
  mod_res (16)..(17): Aib
XPXAXAQXVXGLXPVXXQQF

SEQ ID NO: 2767 - protein, 20 aa, Artificial
  Peptide with targeting and/or antimicrobial activity
  mod_res (1)..(1): Aib
  mod_res (3)..(3): Aib
  mod_res (5)..(6): Aib
  mod_res (8)..(8): Aib
  mod_res (10)..(10): Aib
  mod_res (13)..(13): Aib
  mod_res (16)..(17): Aib
XPXAXXQXVXGLXPVXXEQF

SEQ ID NO: 2768 - protein, 15 aa, Artificial
  Peptide with targeting and/or antimicrobial activity
  mod_res (3)..(4): Aib
  misc_feature (6)..(6): Xaa can be any naturally occurring amino acid
  mod_res (8)..(10): Aib
  mod_res (13)..(13): Aib
WAXXLXQXXXQLXQL

SEQ ID NO: 2769 - protein, 15 aa, Artificial
  Peptide with targeting and/or antimicrobial activity
  mod_res (3)..(4): Aib
  mod_res (6)..(6): Aib
  mod_res (9)..(10): Aib
  mod_res (13)..(13): Aib
WAXXLXQAXXQLXQL

SEQ ID NO: 2770 - protein, 15 aa, Artificial
  Peptide with targeting and/or antimicrobial activity
  mod_res (3)..(4): Aib
  mod_res (6)..(6): Aib
  mod_res (8)..(8): Aib
  mod_res (10)..(10): Aib
  mod_res (13)..(13): Aib
WAXXLXQXAXQLXQL

SEQ ID NO: 2771 - protein, 15 aa, Artificial
  Peptide with targeting and/or antimicrobial activity
  mod_res (3)..(4): Aib
  misc_feature (6)..(6): Xaa can be any naturally occurring amino acid
  mod_res (8)..(9): Aib
  mod_res (13)..(13): Aib
WAXXLXQXXAQLXQL

SEQ ID NO: 2772 - protein, 15 aa, Artificial
  Peptide with targeting and/or antimicrobial activity
  mod_res (3)..(4): Aib
  mod_res (6)..(6): Aib
  mod_res (9)..(10): Aib
WAXXLXQAXXQLAQL

SEQ ID NO: 2773 - protein, 15 aa, Artificial
  Peptide with targeting and/or antimicrobial activity
  mod_res (3)..(4): Aib
  mod_res (6)..(6): Aib
  mod_res (8)..(8): Aib
  mod_res (13)..(13): Aib
WAXXLXQXAAQLXQL

SEQ ID NO: 2774 - protein, 15 aa, Artificial
  Peptide with targeting and/or antimicrobial activity
  mod_res (3)..(4): Aib
  mod_res (6)..(6): Aib
  mod_res (8)..(9): Aib
WAXXLXQXXAQLAQL

SEQ ID NO: 2775 - protein, 15 aa, Artificial
  Peptide with targeting and/or antimicrobial activity
  mod_res (3)..(4): Aib
  mod_res (6)..(6): Aib
  mod_res (10)..(10): Aib
  mod_res (13)..(13): Aib
WAXXLXQAAXQLXQL

SEQ ID NO: 2776 - protein, 16 aa, Artificial
  Peptide with targeting and/or antimicrobial activity
  mod_res (2)..(4): Aib
  mod_res (5)..(5): Isovaline
  mod_res (8)..(9): Aib
  mod_res (10)..(10): Hydroxyproline
  mod_res (12)..(12): Isovaline
  mod_res (13)..(13): Hydroxyproline
  mod_res (14)..(14): Aib
FXXXXGLXXXQXXXPF

SEQ ID NO: 2777 - protein, 16 aa, Artificial
  Peptide with targeting and/or antimicrobial activity
  mod_res (2)..(4): Aib
  mod_res (5)..(5): Isovaline
  mod_res (8)..(9): Aib
  mod_res (10)..(10): Hydroxyproline
  mod_res (12)..(12): Isovaline
  mod_res (14)..(14): Aib
FXXXXGLXXXQXPXPF

SEQ ID NO: 2778 - protein, 16 aa, Artificial
  Peptide with targeting and/or antimicrobial activity
  mod_res (2)..(5): Aib
  mod_res (8)..(9): Aib
  mod_res (10)..(10): Hydroxyproline
  mod_res (12)..(12): Isovaline
  mod_res (13)..(13): Hydroxyproline
  mod_res (14)..(14): Aib
FXXXXGLXXXQXXXPF

SEQ ID NO: 2779 - protein, 16 aa, Artificial
  Peptide with targeting and/or antimicrobial activity
  mod_res (2)..(4): Aib
  mod_res (5)..(5): Isovaline
  mod_res (8)..(9): Aib
  mod_res (10)..(10): Hydroxyproline
  mod_res (12)..(12): Isovaline
  mod_res (13)..(13): Hydroxyproline
  mod_res (14)..(14): Aib
FXXXXGLXXXQXXXPF

SEQ ID NO: 2780 - protein, 16 aa, Artificial
  Peptide with targeting and/or antimicrobial activity
  mod_res (2)..(4): Aib
  mod_res (5)..(5): Isovaline
  mod_res (8)..(9): Aib
  mod_res (10)..(10): Hydroxyproline
  mod_res (12)..(12): Isovaline
  mod_res (13)..(13): Hydroxyproline
  mod_res (14)..(14): Aib
FXXXXALXXXQXXXPF

SEQ ID NO: 2781 - protein, 16 aa, Artificial
  Peptide with targeting and/or antimicrobial activity
  mod_res (2)..(5): Aib
  mod_res (8)..(9): Aib
  mod_res (10)..(10): Hydroxyproline
  mod_res (12)..(12): Aib
  mod_res (13)..(13): Hydroxyproline
  mod_res (14)..(14): Aib
FXXXXGLXXXQXXXPF

SEQ ID NO: 2782 - protein, 16 aa, Artificial
  Peptide with targeting and/or antimicrobial activity
  mod_res (3)..(3): Aib
  misc_feature (4)..(4): Xaa can be any naturally occurring amino acid
  mod_res (5)..(5): Aib
  mod_res (8)..(9): Aib
  mod_res (10)..(10): Hydroxyproline
  mod_res (12)..(12): Isovaline
  mod_res (13)..(13): Hydroxyproline
  mod_res (14)..(14): Aib
FAXXXGLXXXQXXXPF

SEQ ID NO: 2783 - protein, 16 aa, Artificial
  Peptide with targeting and/or antimicrobial activity
  mod_res (2)..(4): Aib
  mod_res (5)..(5): Isovaline
  mod_res (8)..(9): Aib
  mod_res (10)..(10): Hydroxyproline
  mod_res (12)..(12): Aib
  mod_res (13)..(13): Hydroxyproline
  mod_res (14)..(14): Aib
FXXXXGLXXXQXXXPF

SEQ ID NO: 2784 - protein, 16 aa, Artificial
  Peptide with targeting and/or antimicrobial activity
  mod_res (2)..(2): Aib
  mod_res (4)..(4): Aib
  mod_res (5)..(5): Isovaline
  mod_res (8)..(9): Aib
  mod_res (10)..(10): Hydroxyproline
  mod_res (12)..(12): Aib
  mod_res (13)..(13): Hydroxyproline
  mod_res (14)..(14): Aib
FXAXXGLXXXQXXXPF

SEQ ID NO: 2785 - protein, 16 aa, Artificial
  Peptide with targeting and/or antimicrobial activity
  mod_res (2)..(4): Aib
  mod_res (5)..(5): Isovaline
  mod_res (8)..(8): Isovaline
  mod_res (9)..(9): Aib
  mod_res (10)..(10): Hydoxyproline
  mod_res (12)..(12): Aib
  mod_res (13)..(13): Hydoxyproline
  mod_res (14)..(14): Aib
FXXXXGLXXXQXXXPF

SEQ ID NO: 2786 - protein, 16 aa, Artificial
  Peptide with targeting and/or antimicrobial activity
  mod_res (2)..(5): Aib
  mod_res (8)..(9): Aib
  mod_res (10)..(10): Hydroxyproline
  mod_res (12)..(12): Isovaline
  mod_res (13)..(13): Hydroxyproline
  mod_res (14)..(14): Aib
FXXXXALXXXQXXXPF

SEQ ID NO: 2787 - protein, 16 aa, Artificial
  Peptide with targeting and/or antimicrobial activity
  mod_res (2)..(5): Aib
  mod_res (9)..(9): Aib
  mod_res (10)..(10): Hydroxyproline
  mod_res (12)..(12): Isovaline
  mod_res (13)..(13): Hydroxyproline
  mod_res (14)..(14): Aib
FXXXXGLAXXQXXXPF

SEQ ID NO: 2788 - protein, 16 aa, Artificial
  Peptide with targeting and/or antimicrobial activity
  mod_res (2)..(5): Aib
  mod_res (8)..(9): Aib
  mod_res (10)..(10): Hydroxyproline
  mod_res (12)..(12): Isovaline
  mod_res (13)..(13): Hydroxyproline
  mod_res (14)..(14): Aib
VXXXXGLXXXQXXXPF

SEQ ID NO: 2789 - protein, 16 aa, Artificial
  Peptide with targeting and/or antimicrobial activity
  mod_res (2)..(4): Aib
  mod_res (8)..(9): Aib
  mod_res (10)..(10): Hydroxyproline
  mod_res (11)..(11): Isovaline
  misc_feature (12)..(12): Xaa can be any naturally occurring amino acid
  mod_res (13)..(13): Hydroxyproline
  mod_res (14)..(14): Aib
VXXXVGLXXXQXXXPF

SEQ ID NO: 2790 - protein, 16 aa, Artificial
  Peptide with targeting and/or antimicrobial activity
  mod_res (2)..(5): Aib
  mod_res (8)..(9): Aib
  mod_res (10)..(10): Hydroxyproline
  mod_res (12)..(12): Isovaline
  mod_res (13)..(13): Hydroxyproline
  mod_res (14)..(14): Aib
LXXXXGLXXXQXXXPF

SEQ ID NO: 2791 - protein, 16 aa, Artificial
  Peptide with targeting and/or antimicrobial activity
  mod_res (2)..(4): Aib
  mod_res (5)..(5): Isovaline
  mod_res (8)..(9): Aib
  mod_res (10)..(10): Hydroxyproline
  mod_res (12)..(12): Isovaline
  mod_res (13)..(13): Hydroxyproline
  mod_res (14)..(14): Aib
LXXXXGLXXXQXXXPF

SEQ ID NO: 2792 - protein, 20 aa, Artificial
  Peptide with targeting and/or antimicrobial activity
  mod_res (1)..(1): Aib
  misc_feature (3)..(3): Xaa can be any naturally occurring amino acid
  mod_res (5)..(5): Aib
  mod_res (8)..(8): Aib
  mod_res (10)..(10): Aib
  mod_res (13)..(13): Aib
  mod_res (16)..(17): Aib
XPXAXAQXVXGLXPVXXQQF

SEQ ID NO: 2793 - protein, 20 aa, Artificial
  Peptide with targeting and/or antimicrobial activity
  mod_res (1)..(1): Aib
  mod_res (3)..(3): Aib
  mod_res (5)..(5): Aib
  mod_res (8)..(8): Aib
  mod_res (10)..(10): Aib
  mod_res (13)..(13): Aib
  mod_res (16)..(16): Aib
  mod_res (17)..(17): Isovaline
XPXAXAQXVXGLXPVXXQQF

SEQ ID NO: 2794 - protein, 20 aa, Artificial
  Peptide with targeting and/or antimicrobial activity
  mod_res (1)..(1): Aib
  mod_res (3)..(3): Aib
  mod_res (5)..(6): Aib
  mod_res (8)..(8): Aib
  mod_res (10)..(10): Aib
  mod_res (13)..(13): Aib
  mod_res (16)..(16): Aib
  mod_res (17)..(17): Isovaline
XPXAXXQXVXGLXPVXXQQF

SEQ ID NO: 2795 - protein, 15 aa, Artificial
  Peptide with targeting and/or antimicrobial activity
  mod_res (2)..(4): Aib
  mod_res (8)..(9): Aib
  mod_res (10)..(10): Hydroxyproline
  misc_feature (12)..(12): Xaa can be any naturally occurring amino acid
  mod_res (13)..(13): Hydroxyproline
  mod_res (14)..(14): Aib
VXXXVGLXXXQXXXF

SEQ ID NO: 2796 - protein, 15 aa, Artificial
  Peptide with targeting and/or antimicrobial activity
  mod_res (2)..(4): Aib
  mod_res (9)..(9): Aib
  mod_res (10)..(10): Hydroxyproline
  mod_res (12)..(12): Aib
  mod_res (13)..(13): Hydroxyproline
  mod_res (14)..(14): Aib
VXXXVGLVXXQXXXF

SEQ ID NO: 2797 - protein, 15 aa, Artificial
  Peptide with targeting and/or antimicrobial activity
  mod_res (2)..(4): Aib
  mod_res (8)..(9): Aib
  mod_res (10)..(10): Hydroxyproline
  mod_res (12)..(12): Aib
  mod_res (13)..(13): Hydroxyproline
  mod_res (14)..(14): Aib
VXXXVGLXXXQXXXF

SEQ ID NO: 2798 - protein, 14 aa, Artificial
  Peptide with targeting and/or antimicrobial activity
  mod_res (2)..(3): Aib
  mod_res (7)..(8): Aib
  mod_res (9)..(9): Hydroxyproline
  mod_res (11)..(11): Aib
  mod_res (12)..(12): Hydroxyproline
  mod_res (13)..(13): Aib
VXXVGLXXXQXXXF

SEQ ID NO: 2799 - protein, 19 aa, Artificial
  Peptide with targeting and/or antimicrobial activity
  mod_res (2)..(2): Aib
  mod_res (4)..(4): Aib
  mod_res (5)..(5): Isovaline
  mod_res (9)..(10): Aib
  mod_res (13)..(13): Aib
  mod_res (15)..(17): Aib
FXAXXLQGXXAAXPXXXQW

SEQ ID NO: 2800 - protein, 16 aa, Artificial
  Peptide with targeting and/or antimicrobial activity
  mod_res (2)..(5): Aib
  mod_res (8)..(8): Isovaline
  mod_res (9)..(9): Aib
  mod_res (10)..(10): Hydroxyproline
  mod_res (12)..(12): Isovaline
  mod_res (13)..(13): Hydroxyproline
  mod_res (14)..(14): Aib
FXXXXGLXXXQXXXPF

SEQ ID NO: 2801 - protein, 16 aa, Artificial
  Peptide with targeting and/or antimicrobial activity
  mod_res (2)..(5): Aib
  mod_res (8)..(8): Isovaline
  mod_res (9)..(9): Aib
  mod_res (10)..(10): Hydroxyproline
  mod_res (12)..(12): Isovaline
  mod_res (13)..(13): Hydroxyproline
  mod_res (14)..(14): Aib
FXXXXALXXXQXXXPF

SEQ ID NO: 2802 - protein, 16 aa, Artificial
  Peptide with targeting and/or antimicrobial activity
  mod_res (2)..(4): Aib
  misc_feature (5)..(5): Xaa can be any naturally occurring amino acid
  mod_res (8)..(8): Isovaline
  mod_res (9)..(9): Aib
  mod_res (10)..(10): Hydroxyproline
  mod_res (12)..(12): Isovaline
  mod_res (13)..(13): Hydroxyproline
  mod_res (14)..(14): Aib
FXXXXGLXXXQXXXPF

SEQ ID NO: 2803 - protein, 16 aa, Artificial
  Peptide with targeting and/or antimicrobial activity
  mod_res (2)..(5): Aib
  mod_res (8)..(8): Isovaline
  mod_res (9)..(9): Aib
  mod_res (10)..(10): Hydroxyproline
  mod_res (12)..(12): Aib
  mod_res (13)..(13): Hydroxyproline
  mod_res (14)..(14): Aib
FXXXXGLXXXQXXXPF

SEQ ID NO: 2804 - protein, 16 aa, Artificial
  Peptide with targeting and/or antimicrobial activity
  mod_res (2)..(5): Aib
  mod_res (8)..(9): Aib
  mod_res (10)..(10): Hydroxyproline
  mod_res (12)..(12): Aib
  mod_res (13)..(13): Hydroxyproline
  mod_res (14)..(14): Aib
FXXXXGLXXXQXXXPF

SEQ ID NO: 2805 - protein, 16 aa, Artificial
  Peptide with targeting and/or antimicrobial activity
  mod_res (2)..(5): Aib
  mod_res (8)..(9): Aib
  mod_res (10)..(10): Hydroxyproline
  mod_res (12)..(12): Aib
  mod_res (13)..(13): Aib
  mod_res (14)..(14): Aib
FXXXXGLXXXQXXXPF

SEQ ID NO: 2806 - protein, 17 aa, Artificial
  Peptide with targeting and/or antimicrobial activity
  mod_res (2)..(2): Isovaline
  mod_res (4)..(4): Aib
  mod_res (7)..(7): Aib
  mod_res (9)..(9): Aib
  mod_res (10)..(10): Hydroxyproline
  mod_res (12)..(12): Aib
  mod_res (13)..(13): Hydroxyproline
  mod_res (14)..(14): Aib
FXQXITXLXXQXXXPFS

SEQ ID NO: 2807 - protein, 17 aa, Artificial
  Peptide with targeting and/or antimicrobial activity
  mod_res (2)..(2): Isovaline
  mod_res (4)..(4): Aib
  mod_res (7)..(7): Aib
  mod_res (9)..(9): Aib
  mod_res (12)..(12): Aib
  mod_res (13)..(13): Hydroxyproline
  mod_res (14)..(14): Aib
FXQXITXLXPQXXXPFS

SEQ ID NO: 2808 - protein, 12 aa, Artificial
  Peptide with targeting and/or antimicrobial activity
  mod_res (2)..(2): Aib
  mod_res (4)..(4): Aib
  mod_res (6)..(6): Aib
  mod_res (9)..(9): Aib
LXPXLXPAXPVL

SEQ ID NO: 2809 - protein, 12 aa, Artificial
  Peptide with targeting and/or antimicrobial activity
  mod_res (2)..(2): Aib
  mod_res (4)..(4): Aib
  mod_res (6)..(6): Aib
  mod_res (9)..(9): Aib
LXPXLXPAXPVL

SEQ ID NO: 2810 - protein, 19 aa, Artificial
  Peptide with targeting and/or antimicrobial activity
  mod_res (2)..(2): Aib
  mod_res (4)..(5): Aib
  mod_res (9)..(10): Aib
  mod_res (13)..(13): Aib
  mod_res (15)..(17): Aib
FXSXXLQGXXAAXPXXXQW

SEQ ID NO: 2811 - protein, 19 aa, Artificial
  Peptide with targeting and/or antimicrobial activity
  mod_res (2)..(2): Aib
  mod_res (4)..(5): Aib
  mod_res (9)..(10): Aib
  mod_res (13)..(13): Aib
  mod_res (15)..(15): Isovaline
  mod_res (16)..(17): Aib
FXSXXLQGXXAAXPXXXQW

SEQ ID NO: 2812 - protein, 19 aa, Artificial
  Peptide with targeting and/or antimicrobial activity
  mod_res (2)..(2): Aib
  mod_res (4)..(4): Aib
  mod_res (5)..(5): Isovaline
  mod_res (9)..(10): Aib
  mod_res (13)..(13): Aib
  mod_res (15)..(17): Aib
FXSXXLQGXXAAXPXXXQW

SEQ ID NO: 2813 - protein, 19 aa, Artificial
  Peptide with targeting and/or antimicrobial activity
  mod_res (2)..(2): Aminoisobutyric acid
  mod_res (4)..(4): Aminoisobutyric acid
  mod_res (5)..(5): Isovaline
  mod_res (9)..(10): Aminoisobutyric acid
  mod_res (13)..(13): Aminoisobutyric acid
  mod_res (15)..(15): Isovaline
  mod_res (16)..(17): Aminoisobutyric acid
FXSXXLQGXXAABPXXXQW

SEQ ID NO: 2814 - protein, 14 aa, Artificial
  Peptide with targeting and/or antimicrobial activity
  mod_res (1)..(1): Aminoisobutyric acid
  mod_res (2)..(2): Hydroxyproline
  mod_res (4)..(4): Isovaline
  mod_res (5)..(5): Hydroxyproline
  mod_res (7)..(7): Isovaline
  mod_res (8)..(8): Hydroxyproline
  mod_res (9)..(9): Aminoisobutyric acid
  mod_res (10)..(10): Isovaline
  mod_res (11)..(11): Aminoisobutyric acid
  mod_res (12)..(12): Hydroxyproline
  mod_res (13)..(13): Isovaline
XXLXXLXXXXXXXI

SEQ ID NO: 2815 - protein, 16 aa, Artificial
  Peptide with targeting and/or antimicrobial activity
  mod_res (4)..(4): Aminoisobutyric acid
  mod_res (7)..(7): Aminoisobutyric acid
  mod_res (9)..(9): Aminoisobutyric acid
  mod_res (10)..(10): Hydroxyproline
  mod_res (12)..(12): Aminoisobutyric acid
  mod_res (13)..(13): Hydroxyproline
  mod_res (14)..(14): Aminoisobutyric acid
WIQXITXLXXQXXXPF

SEQ ID NO: 2816 - protein, 16 aa, Artificial
  Peptide with targeting and/or antimicrobial activity
  mod_res (4)..(4): Isovaline
  mod_res (7)..(7): Aminoisobutyric acid
  mod_res (9)..(9): Aminoisobutyric acid
  mod_res (10)..(10): Hydroxyproline
  mod_res (11)..(11): Aminoisobutyric acid
  misc_feature (12)..(12): Xaa can be any naturally occurring amino acid
  mod_res (13)..(13): Aminoisobutyric acid
  mod_res (13)..(13): Hydroxyproline
  misc_feature (14)..(14): Xaa can be any naturally occurring amino acid
WIQXITXLXXQXXXPF

SEQ ID NO: 2817 - protein, 15 aa, Artificial
  Peptide with targeting and/or antimicrobial activity
  mod_res (2)..(4): Aminoisobutyric acid
  mod_res (8)..(9): Aminoisobutyric acid
  mod_res (10)..(10): Hydroxyproline
  mod_res (12)..(12): Isovaline
  mod_res (13)..(13): Hydroxyproline
  misc_feature (14)..(14): Xaa can be any naturally occurring amino acid
FXXXVGLXXXQXXXF

SEQ ID NO: 2818 - protein, 15 aa, Artificial
  Peptide with targeting and/or antimicrobial activity
  mod_res (2)..(4): Aminoisobutyric acid
  mod_res (8)..(9): Aminoisobutyric acid
  mod_res (10)..(10): Hydroxyproline
  mod_res (11)..(11): Isovaline
  misc_feature (12)..(12): Xaa can be any naturally occurring amino acid
  mod_res (13)..(13): Hydroxyproline
FXXXVGLXXXQXXAF

SEQ ID NO: 2819 - protein, 11 aa, Artificial
  Peptide with targeting and/or antimicrobial activity
  mod_res (1)..(1): Aminoisobutyric acid
  mod_res (5)..(5): Aminoisobutyric acid
  mod_res (7)..(7): Isovaline
  mod_res (9)..(9): Aminoisobutyric acid
XNLIXPXLXPL

SEQ ID NO: 2820 - protein, 14 aa, Artificial
  Peptide with targeting and/or antimicrobial activity
  mod_res (1)..(1): Aminoisobutyric acid
  mod_res (4)..(4): Aminoisobutyric acid
  mod_res (8)..(8): Aminoisobutyric acid
  mod_res (10)..(10): Aminoisobutyric acid
  mod_res (12)..(12): Aminoisobutyric acid
XNLXPSVXPXLXPL

SEQ ID NO: 2821 - protein, 14 aa, Artificial
  Peptide with targeting and/or antimicrobial activity
  mod_res (1)..(1): Aminoisobutyric acid
  mod_res (4)..(4): Aminoisobutyric acid
  mod_res (8)..(8): Aminoisobutyric acid
  mod_res (10)..(10): Isovaline
  mod_res (12)..(12): Aminoisobutyric acid
XNLXPSVXPXLXPL

SEQ ID NO: 2822 - protein, 14 aa, Artificial
  Peptide with targeting and/or antimicrobial activity
  mod_res (1)..(1): Aminoisobutyric acid
  mod_res (4)..(4): Aminoisobutyric acid
  mod_res (8)..(8): Aminoisobutyric acid
  mod_res (10)..(10): Isovaline
  mod_res (12)..(12): Aminoisobutyric acid
XNLXPAIXPXLXPL

SEQ ID NO: 2823 - protein, 14 aa, Artificial
  Peptide with targeting and/or antimicrobial activity
  mod_res (1)..(1): Aminoisobutyric acid
  mod_res (4)..(4): Aminoisobutyric acid
  mod_res (8)..(8): Aminoisobutyric acid
  mod_res (10)..(10): Aminoisobutyric acid
  mod_res (12)..(12): Aminoisobutyric acid
XNLXPAVXPXLXPL

SEQ ID NO: 2824 - protein, 14 aa, Artificial
  Peptide with targeting and/or antimicrobial activity
  mod_res (1)..(1): Aminoisobutyric acid
  mod_res (4)..(4): Aminoisobutyric acid
  mod_res (8)..(8): Aminoisobutyric acid
  mod_res (10)..(10): Isovaline
  mod_res (12)..(12): Aminoisobutyric acid
XNLXPAVXPXLXPL

SEQ ID NO: 2825 - protein, 14 aa, Artificial
  Peptide with targeting and/or antimicrobial activity
  mod_res (1)..(1): Aminoisobutyric acid
  mod_res (4)..(4): Aminoisobutyric acid
  mod_res (8)..(8): Aminoisobutyric acid
  mod_res (10)..(10): Isovaline
  mod_res (12)..(12): Aminoisobutyric acid
XNLXPAVXPXLXPL

SEQ ID NO: 2826 - protein, 14 aa, Artificial
  Peptide with targeting and/or antimicrobial activity
  mod_res (1)..(1): Aminoisobutyric acid
  mod_res (4)..(4): Aminoisobutyric acid
  mod_res (8)..(8): Aminoisobutyric acid
  mod_res (10)..(10): Isovaline
  mod_res (12)..(12): Aminoisobutyric acid
XQLXPAVXPXLXPL

SEQ ID NO: 2827 - protein, 14 aa, Artificial
  Peptide with targeting and/or antimicrobial activity
  mod_res (1)..(1): Aminoisobutyric acid
  mod_res (4)..(4): Aminoisobutyric acid
  mod_res (8)..(8): Aminoisobutyric acid
  mod_res (10)..(10): Aminoisobutyric acid
  mod_res (12)..(12): Aminoisobutyric acid
XNLXPSIXPXLXPL

SEQ ID NO: 2828 - protein, 14 aa, Artificial
  Peptide with targeting and/or antimicrobial activity
  mod_res (1)..(1): Aminoisobutyric acid
  mod_res (4)..(4): Aminoisobutyric acid
  mod_res (8)..(8): Aminoisobutyric acid
  mod_res (10)..(10): Isovaline
  mod_res (12)..(12): Aminoisobutyric acid
XNLXPSIXPXLXPL

SEQ ID NO: 2829 - protein, 14 aa, Artificial
  Peptide with targeting and/or antimicrobial activity
  mod_res (1)..(1): Aminoisobutyric acid
  mod_res (4)..(4): Aminoisobutyric acid
  mod_res (8)..(8): Aminoisobutyric acid
  mod_res (10)..(10): Isovaline
  mod_res (12)..(12): Aminoisobutyric acid
XQLXPSIXPXLXPL

SEQ ID NO: 2830 - protein, 14 aa, Artificial
  Peptide with targeting and/or antimicrobial activity
  mod_res (1)..(1): Aminoisobutyric acid
  mod_res (4)..(4): Aminoisobutyric acid
  mod_res (8)..(8): Aminoisobutyric acid
  mod_res (10)..(10): Aminoisobutyric acid
  mod_res (12)..(12): Aminoisobutyric acid
XNLXPAIXPXLXPL

SEQ ID NO: 2831 - protein, 14 aa, Artificial
  Peptide with targeting and/or antimicrobial activity
  mod_res (1)..(1): Aminoisobutyric acid
  mod_res (4)..(4): Aminoisobutyric acid
  mod_res (8)..(8): Aminoisobutyric acid
  mod_res (10)..(10): Isovaline
  mod_res (12)..(12): Aminoisobutyric acid
XQLXPAIXPXLXPL

SEQ ID NO: 2832 - protein, 11 aa, Artificial
  Peptide with targeting and/or antimicrobial activity
  mod_res (1)..(1): Aminoisobutyric acid
  mod_res (5)..(5): Aminoisobutyric acid
  mod_res (9)..(9): Aminoisobutyric acid
XNIIXPLLXPL

SEQ ID NO: 2833 - protein, 14 aa, Artificial
  Peptide with targeting and/or antimicrobial activity
  mod_res (1)..(1): Aminoisobutyric acid
  mod_res (4)..(4): Aminoisobutyric acid
  mod_res (8)..(8): Aminoisobutyric acid
  mod_res (10)..(10): Aminoisobutyric acid
  mod_res (12)..(12): Aminoisobutyric acid
XNLXPSIXPXLXPV

SEQ ID NO: 2834 - protein, 12 aa, Artificial
  Peptide with targeting and/or antimicrobial activity
  mod_res (2)..(3): Ethylnorvaline
  mod_res (5)..(5): Aminoisobutyric acid
  mod_res (8)..(9): Aminoisobutyric acid
PXXAXIIXXAAE

SEQ ID NO: 2835 - protein, 13 aa, Artificial
  Peptide with targeting and/or antimicrobial activity
  mod_res (2)..(3): Ethylnorvaline
  mod_res (5)..(5): Aminoisobutyric acid
  mod_res (8)..(9): Aminoisobutyric acid
PXXAXIIXXAMAE

SEQ ID NO: 2836 - protein, 15 aa, Artificial
  Peptide with targeting and/or antimicrobial activity
  mod_res (2)..(4): Aminoisobutyric acid
  mod_res (8)..(9): Aminoisobutyric acid
  mod_res (10)..(10): Hydroxyproline
  mod_res (12)..(12): Aminoisobutyric acid
  mod_res (13)..(13): Hydroxyproline
  mod_res (14)..(14): Aminoisobutyric acid
FXXXVGLXXXQXXXF

SEQ ID NO: 2837 - protein, 20 aa, Artificial
  Peptide with targeting and/or antimicrobial activity
  mod_res (1)..(1): Aminoisobutyric acid
  mod_res (3)..(3): Aminoisobutyric acid
  misc_feature (5)..(5): Xaa can be any naturally occurring amino acid
  mod_res (6)..(7): Aminoisobutyric acid
  mod_res (9)..(9): Aminoisobutyric acid
  mod_res (11)..(13): Aminoisobutyric acid
  mod_res (16)..(17): Aminoisobutyric acid
XPXAXXQLXGXXXPVXXQQL

SEQ ID NO: 2838 - protein, 20 aa, Artificial
  Peptide with targeting and/or antimicrobial activity
  mod_res (1)..(1)
  mod_res (3)..(3)
  mod_res (5)..(6)
  mod_res (8)..(8)
  mod_res (10)..(10)
  mod_res (12)..(13)
  mod_res (16)..(17)
XPXAXXQXLXGXXPVXXQQL

SEQ ID NO: 2839 - protein, 20 aa, Artificial
  Peptide with targeting and/or antimicrobial activity
  mod_res (1)..(1): Aminoisobutyric acid
  mod_res (3)..(3): Aminoisobutyric acid
  mod_res (5)..(5): Aminoisobutyric acid
  mod_res (8)..(8): Aminoisobutyric acid
  mod_res (10)..(10): Aminoisobutyric acid
  mod_res (12)..(13): Aminoisobutyric acid
  mod_res (16)..(17): Aminoisobutyric acid
XPXAXAQXLXGXXPVXXQQL

SEQ ID NO: 2840 - protein, 19 aa, Artificial
  Peptide with targeting and/or antimicrobial activity
  mod_res (1)..(1): Aminoisobutyric acid
  mod_res (3)..(3): Aminoisobutyric acid
  mod_res (5)..(6): Aminoisobutyric acid
  mod_res (8)..(8): Aminoisobutyric acid
  mod_res (10)..(10): Aminoisobutyric acid
  mod_res (12)..(13): Aminoisobutyric acid
  mod_res (16)..(17): Aminoisobutyric acid
XPXAXXQXLXGXXPVXXQQ

SEQ ID NO: 2841 - protein, 20 aa, Artificial
  Peptide with targeting and/or antimicrobial activity
  mod_res (1)..(1): Aminoisobutyric acid
  mod_res (3)..(3): Aminoisobutyric acid
  mod_res (5)..(6): Aminoisobutyric acid
  mod_res (8)..(8): Aminoisobutyric acid
  mod_res (10)..(10): Aminoisobutyric acid
  mod_res (12)..(13): Aminoisobutyric acid
  mod_res (16)..(17): Aminoisobutyric acid
XPXAXXQXIXGXXPVXXQQL

SEQ ID NO: 2842 - protein, 20 aa, Artificial
  Peptide with targeting and/or antimicrobial activity
  mod_res (1)..(1): Aminoisobutyric acid
  mod_res (3)..(3): Aminoisobutyric acid
  mod_res (4)..(6): Aminoisobutyric acid
  mod_res (8)..(8): Aminoisobutyric acid
  mod_res (10)..(10): Aminoisobutyric acid
  mod_res (12)..(13): Aminoisobutyric acid
  mod_res (16)..(16): Aminoisobutyric acid
  mod_res (17)..(17): Isovaline
XPXAXXQXLXGXXPVXXQQL

SEQ ID NO: 2843 - protein, 20 aa, Artificial
  Peptide with targeting and/or antimicrobial activity
  mod_res (1)..(1): Aminoisobutyric acid
  mod_res (3)..(3): Aminoisobutyric acid
  mod_res (5)..(6): Aminoisobutyric acid
  mod_res (8)..(8): Aminoisobutyric acid
  mod_res (10)..(10): Aminoisobutyric acid
  mod_res (12)..(13): Aminoisobutyric acid
  mod_res (16)..(16): Aminoisobutyric acid
  mod_res (17)..(17): Isovaline
XPXAXXQXIXGXXPVXXQQL

SEQ ID NO: 2844 - protein, 20 aa, Artificial
  Peptide with targeting and/or antimicrobial activity
  mod_res (1)..(1): Aminoisobutyric acid
  mod_res (3)..(3): Aminoisobutyric acid
  mod_res (5)..(6): Aminoisobutyric acid
  mod_res (8)..(8): Aminoisobutyric acid
  mod_res (10)..(10): Aminoisobutyric acid
  mod_res (12)..(13): Aminoisobutyric acid
  mod_res (16)..(17): Aminoisobutyric acid
XPXAXXQXLXGXXPVXXQQI

SEQ ID NO: 2845 - protein, 20 aa, Artificial
  Peptide with targeting and/or antimicrobial activity
  mod_res (1)..(1): Aminoisobutyric acid
  mod_res (3)..(3): Aminoisobutyric acid
  mod_res (5)..(5): Aminoisobutyric acid
  mod_res (8)..(8): Aminoisobutyric acid
  mod_res (10)..(10): Aminoisobutyric acid
  mod_res (12)..(13): Aminoisobutyric acid
  mod_res (16)..(17): Aminoisobutyric acid
XPXAXAQXLXGXXPVXXQQI

SEQ ID NO: 2846 - protein, 20 aa, Artificial
  Peptide with targeting and/or antimicrobial activity
  mod_res (1)..(1): Aminoisobutyric acid
  mod_res (3)..(3): Aminoisobutyric acid
  mod_res (5)..(5): Aminoisobutyric acid
  mod_res (8)..(8): Aminoisobutyric acid
  mod_res (10)..(10): Aminoisobutyric acid
  mod_res (12)..(13): Aminoisobutyric acid
  mod_res (16)..(16): Aminoisobutyric acid
  mod_res (17)..(17): Isovaline
XPXAXAQXLXGXXPVXXQQL

SEQ ID NO: 2847 - protein, 20 aa, Artificial
  Peptide with targeting and/or antimicrobial activity
  mod_res (1)..(1): Aminoisobutyric acid
  mod_res (3)..(3): Aminoisobutyric acid
  mod_res (5)..(5): Aminoisobutyric acid
  mod_res (8)..(8): Aminoisobutyric acid
  mod_res (10)..(10): Aminoisobutyric acid
  mod_res (12)..(13): Aminoisobutyric acid
  mod_res (16)..(17): Aminoisobutyric acid
XPXAXAQXIXGXXPVXXQQL

SEQ ID NO: 2848 - protein, 20 aa, Artificial
  Peptide with targeting and/or antimicrobial activity
  mod_res (1)..(1): Aminoisobutyric acid
  mod_res (3)..(3): Aminoisobutyric acid
  mod_res (5)..(6): Aminoisobutyric acid
  mod_res (8)..(8): Aminoisobutyric acid
  mod_res (10)..(10): Aminoisobutyric acid
  mod_res (12)..(13): Aminoisobutyric acid
  mod_res (16)..(17): Aminoisobutyric acid
BPBABBQBLBGBBPVBBEQL

SEQ ID NO: 2849 - protein, 20 aa, Artificial
  Peptide with targeting and/or antimicrobial activity
  mod_res (1)..(1): Aminoisobutyric acid
  mod_res (3)..(3): Aminoisobutyric acid
  mod_res (5)..(5): Aminoisobutyric acid
  mod_res (8)..(8): Aminoisobutyric acid
  mod_res (10)..(10): Aminoisobutyric acid
  mod_res (12)..(13): Aminoisobutyric acid
  mod_res (16)..(17): Aminoisobutyric acid
BPBABAQBLBGBBPVBBEQL

SEQ ID NO: 2850 - protein, 20 aa, Artificial
  Peptide with targeting and/or antimicrobial activity
  mod_res (1)..(1): Aminoisobutyric acid
  mod_res (3)..(3): Aminoisobutyric acid
  mod_res (5)..(6): Aminoisobutyric acid
  mod_res (8)..(8): Aminoisobutyric acid
  mod_res (10)..(10): Aminoisobutyric acid
  mod_res (12)..(13): Aminoisobutyric acid
  mod_res (16)..(16): Aminoisobutyric acid
  mod_res (17)..(17): Isovaline
XPXAXXQXLXGXXPVXXEQL

SEQ ID NO: 2851 - protein, 20 aa, Artificial
  Peptide with targeting and/or antimicrobial activity
  mod_res (1)..(1): Aminoisobutyric acid
  mod_res (3)..(3): Aminoisobutyric acid
  mod_res (5)..(6): Aminoisobutyric acid
  mod_res (8)..(8): Aminoisobutyric acid
  mod_res (10)..(10): Aminoisobutyric acid
  mod_res (12)..(13): Aminoisobutyric acid
  mod_res (16)..(17): Aminoisobutyric acid
XPXAXXQXIXGXXPVXXEQL

SEQ ID NO: 2852 - protein, 20 aa, Artificial
  Peptide with targeting and/or antimicrobial activity
  mod_res (1)..(1): Aminoisobutyric acid
  mod_res (3)..(3): Aminoisobutyric acid
  mod_res (5)..(6): Aminoisobutyric acid
  mod_res (8)..(8): Aminoisobutyric acid
  mod_res (10)..(10): Aminoisobutyric acid
  mod_res (12)..(13): Aminoisobutyric acid
  mod_res (16)..(17): Aminoisobutyric acid
XPXAXXQXLXGXXPVXXEQI

SEQ ID NO: 2853 - protein, 11 aa, Artificial
  Peptide with targeting and/or antimicrobial activity
  mod_res (1)..(1): Aminoisobutyric acid
  mod_res (5)..(5): Aminoisobutyric acid
  mod_res (9)..(9): Aminoisobutyric acid
XQVVXPLLXPL

SEQ ID NO: 2854 - protein, 11 aa, Artificial
  Peptide with targeting and/or antimicrobial activity
  mod_res (1)..(1): Isovaline
  mod_res (5)..(5): Aminoisobutyric acid
  mod_res (9)..(9): Aminoisobutyric acid
XQVVXPLLXPL

SEQ ID NO: 2855 - protein, 11 aa, Artificial
  Peptide with targeting and/or antimicrobial activity
  mod_res (1)..(1): Aminoisobutyric acid
  mod_res (5)..(5): Aminoisobutyric acid
  mod_res (9)..(9): Aminoisobutyric acid
XQVLXPLIXPL

SEQ ID NO: 2856 - protein, 11 aa, Artificial
  Peptide with targeting and/or antimicrobial activity
  mod_res (1)..(1): Aminoisobutyric acid
  mod_res (5)..(5): Aminoisobutyric acid
  mod_res (9)..(9): Aminoisobutyric acid
XQIVXPLLXPL

SEQ ID NO: 2857 - protein, 11 aa, Artificial
  Peptide with targeting and/or antimicrobial activity
  mod_res (1)..(1): Aminoisobutyric acid
  mod_res (5)..(5): Aminoisobutyric acid
  mod_res (9)..(9): Aminoisobutyric acid
XQIIXPLLXPL

SEQ ID NO: 2858 - protein, 11 aa, Artificial
  Peptide with targeting and/or antimicrobial activity
  mod_res (1)..(1): Aminoisobutyric acid
  mod_res (5)..(5): Aminoisobutyric acid
  mod_res (9)..(9): Aminoisobutyric acid
XQILXPLIXPL

SEQ ID NO: 2859 - protein, 18 aa, Artificial
  Peptide with targeting and/or antimicrobial activity
  mod_res (1)..(1): Aminoisobutyric acid
  mod_res (5)..(5): Aminoisobutyric acid
  mod_res (7)..(7): Aminoisobutyric acid
  mod_res (9)..(9): Aminoisobutyric acid
  mod_res (11)..(12): Aminoisobutyric acid
  mod_res (15)..(16): Aminoisobutyric acid
XSALXQXVXGXXPLXXQV

SEQ ID NO: 2860 - protein, 18 aa, Artificial
  Peptide with targeting and/or antimicrobial activity
  mod_res (1)..(1): Aminoisobutyric acid
  mod_res (5)..(5): Aminoisobutyric acid
  mod_res (7)..(7): Aminoisobutyric acid
  mod_res (9)..(9): Aminoisobutyric acid
  mod_res (11)..(12): Aminoisobutyric acid
  mod_res (15)..(16): Aminoisobutyric acid
XSALXQXVXGXXPLXXQL

SEQ ID NO: 2861 - protein, 18 aa, Artificial
  Peptide with targeting and/or antimicrobial activity
  mod_res (1)..(1): Aminoisobutyric acid
  mod_res (5)..(5): Aminoisobutyric acid
  mod_res (7)..(7): Aminoisobutyric acid
  mod_res (9)..(9): Aminoisobutyric acid
  mod_res (11)..(12): Aminoisobutyric acid
  mod_res (15)..(16): Aminoisobutyric acid
XAALXQXVXGXXPLXXQV

SEQ ID NO: 2862 - protein, 18 aa, Artificial
  Peptide with targeting and/or antimicrobial activity
  mod_res (1)..(1): Aminoisobutyric Acid
  mod_res (5)..(5): Aminoisobutyric Acid
  misc_feature (7)..(7): Xaa can be any naturally occurring amino acid
  mod_res (9)..(9): Aminoisobutyric Acid
  mod_res (11)..(12): Aminoisobutyric Acid
  mod_res (15)..(16): Aminoisobutyric Acid
BSALBQXVBGBBPLBBQV

SEQ ID NO: 2863 - protein, 18 aa, Artificial
  Peptide with targeting and/or antimicrobial activity
  mod_res (1)..(1): Aminoisobutyric Acid
  mod_res (5)..(5): Aminoisobutyric Acid
  mod_res (7)..(7): Aminoisobutyric Acid
  mod_res (9)..(9): Aminoisobutyric Acid
  mod_res (11)..(11): Isovaline
  mod_res (12)..(12): Aminoisobutyric Acid
  mod_res (15)..(16): Aminoisobutyric Acid
XSALXQXVXGXXPLXXQV

SEQ ID NO: 2864 - protein, 18 aa, Artificial
  Peptide with targeting and/or antimicrobial activity
  mod_res (1)..(1): Aminoisobutyric Acid
  mod_res (5)..(5): Aminoisobutyric Acid
  mod_res (7)..(7): Aminoisobutyric Acid
  mod_res (9)..(9): Aminoisobutyric Acid
  mod_res (9)..(9): Aminoisobutyric acid
  mod_res (11)..(11): Isovaline
  mod_res (12)..(12): Aminoisobutyric Acid
  mod_res (15)..(16): Aminoisobutyric Acid
XSALXQXVXGXXPLXXQL

SEQ ID NO: 2865 - protein, 16 aa, Artificial
  Peptide with targeting and/or antimicrobial activity
  mod_res (4)..(4): Isovaline
  mod_res (7)..(7): Aminoisobutyric acid
  mod_res (9)..(9): Aminoisobutyric acid
  misc_feature (10)..(10): Xaa can be any naturally occurring amino acid
  mod_res (12)..(12): Aminoisobutyric acid
  misc_feature (13)..(13): Xaa can be any naturally occurring amino acid
  mod_res (14)..(14): Aminoisobutyric acid
LIQXITXLXXQXXXPF

SEQ ID NO: 2866 - protein, 20 aa, Artificial
  Peptide with targeting and/or antimicrobial activity
  mod_res (1)..(1): Aminoisobutyric acid
  mod_res (3)..(3): Aminoisobutyric acid
  mod_res (5)..(5): Aminoisobutyric acid
  mod_res (8)..(8): Aminoisobutyric acid
  mod_res (10)..(10): Aminoisobutyric acid
  mod_res (13)..(13): Aminoisobutyric acid
  mod_res (16)..(17): Aminoisobutyric acid
BABABAQBVBGLBPVBBQQF

SEQ ID NO: 2867 - protein, 20 aa, Artificial
  Peptide with targeting and/or antimicrobial activity
  mod_res (1)..(1): Aminoisobutyric acid
  mod_res (3)..(3): Aminoisobutyric acid
  mod_res (5)..(5): Aminoisobutyric acid
  mod_res (8)..(8): Aminoisobutyric acid
  mod_res (10)..(10): Aminoisobutyric acid
  mod_res (13)..(13): Aminoisobutyric acid
  mod_res (16)..(16): Aminoisobutyric acid
  mod_res (17)..(17): Isovaline
XAXAXAQXVXGLXPVXXQQF

SEQ ID NO: 2868 - protein, 20 aa, Artificial
  Peptide with targeting and/or antimicrobial activity
  mod_res (1)..(1): Aminoisobutyric acid
  mod_res (3)..(3): Aminoisobutyric acid
  mod_res (5)..(6): Aminoisobutyric acid
  mod_res (8)..(8): Aminoisobutyric acid
  mod_res (10)..(10): Aminoisobutyric acid
  mod_res (13)..(13): Aminoisobutyric acid
  mod_res (16)..(17): Aminoisobutyric acid
XAXAXXQXVXGLXPVXXQQF

SEQ ID NO: 2869 - protein, 20 aa, Artificial
  Peptide with targeting and/or antimicrobial activity
  mod_res (1)..(1): Aminoisobutyric acid
  mod_res (3)..(3): Aminoisobutyric acid
  mod_res (5)..(6): Aminoisobutyric acid
  mod_res (8)..(8): Aminoisobutyric acid
  mod_res (10)..(10): Aminoisobutyric acid
  mod_res (13)..(13): Aminoisobutyric acid
  mod_res (16)..(16): Aminoisobutyric acid
  mod_res (17)..(17): Isovaline
XAXAXXQXVXGLXPVXXQQF

SEQ ID NO: 2870 - protein, 20 aa, Artificial
  Peptide with targeting and/or antimicrobial activity
  mod_res (1)..(1): Aminoisobutyric acid
  mod_res (3)..(3): Aminoisobutyric acid
  mod_res (5)..(5): Aminoisobutyric acid
  mod_res (8)..(8): Aminoisobutyric acid
  mod_res (10)..(10): Aminoisobutyric acid
  mod_res (13)..(13): Aminoisobutyric acid
  mod_res (16)..(17): Aminoisobutyric acid
BABABAQBVBGLBPVBBEQF

SEQ ID NO: 2871 - protein, 20 aa, Artificial
  Peptide with targeting and/or antimicrobial activity
  mod_res (1)..(1): Aminoisobutyric acid
  mod_res (3)..(3): Aminoisobutyric acid
  mod_res (5)..(5): Aminoisobutyric acid
  mod_res (8)..(8): Aminoisobutyric acid
  mod_res (10)..(10): Aminoisobutyric acid
  mod_res (13)..(13): Aminoisobutyric acid
  mod_res (16)..(16): Aminoisobutyric acid
  mod_res (17)..(17): Isovaline
XAXAXAQXVXGLXPVXXEQF

SEQ ID NO: 2872 - protein, 11 aa, Artificial
  Peptide with targeting and/or antimicrobial activity
  mod_res (1)..(1): Aminoisobutyric acid
  mod_res (4)..(4): Aminoisobutyric acid
  mod_res (7)..(7): Aminoisobutyric acid
  mod_res (8)..(8): Ethylnorvaline or Q
XPYXQQXXQAL

SEQ ID NO: 2873 - protein, 11 aa, Artificial
  Peptide with targeting and/or antimicrobial activity
  mod_res (1)..(1): Aminoisobutyric acid
  mod_res (4)..(4): Aminoisobutyric acid
  mod_res (7)..(8): Aminoisobutyric acid
XPFXQQXXQAL

SEQ ID NO: 2874 - protein, 10 aa, Artificial
  Peptide with targeting and/or antimicrobial activity
  mod_res (1)..(1): Aminoisobutyric acid
  mod_res (4)..(4): Aminoisobutyric acid
  mod_res (7)..(7): Aminoisobutyric acid
  mod_res (8)..(8): Ethylnorvaline or Q
SPFSQQXXAL

SEQ ID NO: 2875 - protein, 12 aa, Artificial
  Peptide with targeting and/or antimicrobial activity
  mod_res (1)..(1): Aminoisobutyric acid
  mod_res (4)..(4): Aminoisobutyric acid
  mod_res (5)..(5): Isovaline
  mod_res (7)..(9): Aminoisobutyric acid
  mod_res (12)..(12): Aminoisobutyric acid
XAAXXQXXXSLX

SEQ ID NO: 2876 - protein, 20 aa, Artificial
  Peptide with targeting and/or antimicrobial activity
  mod_res (1)..(1): Aminoisobutyric acid
  mod_res (3)..(3): Aminoisobutyric acid
  mod_res (5)..(5): Aminoisobutyric acid
  mod_res (8)..(8): Aminoisobutyric acid
  mod_res (10)..(10): Aminoisobutyric acid
  mod_res (12)..(13): Aminoisobutyric acid
  mod_res (16)..(17): Aminoisobutyric acid
XAXAXAQXVXGXXPVXXQQF

SEQ ID NO: 2877 - protein, 20 aa, Artificial
  Peptide with targeting and/or antimicrobial activity
  mod_res (1)..(1): Aminoisobutyric acid
  mod_res (3)..(3): Aminoisobutyric acid
  mod_res (5)..(5): Aminoisobutyric acid
  mod_res (8)..(8): Aminoisobutyric acid
  mod_res (10)..(10): Aminoisobutyric acid
  mod_res (12)..(13): Aminoisobutyric acid
  mod_res (16)..(17): Aminoisobutyric acid
XAXAXAQXLXGXXPVXXQQF

SEQ ID NO: 2878 - protein, 20 aa, Artificial
  Peptide with targeting and/or antimicrobial activity
  mod_res (1)..(1): Aminoisobutyric acid
  mod_res (3)..(3): Aminoisobutyric acid
  mod_res (5)..(6): Aminoisobutyric acid
  mod_res (8)..(8): Aminoisobutyric acid
  mod_res (10)..(10): Aminoisobutyric acid
  mod_res (12)..(13): Aminoisobutyric acid
  mod_res (16)..(17): Aminoisobutyric acid
XAXAXXQXVXGXXPVXXQQF

SEQ ID NO: 2879 - protein, 20 aa, Artificial
  Peptide with targeting and/or antimicrobial activity
  mod_res (1)..(1): Aminoisobutyric acid
  mod_res (3)..(3): Aminoisobutyric acid
  mod_res (5)..(6): Aminoisobutyric acid
  mod_res (8)..(8): Aminoisobutyric acid
  mod_res (10)..(10): Aminoisobutyric acid
  mod_res (12)..(13): Aminoisobutyric acid
  mod_res (16)..(17): Aminoisobutyric acid
XAXAXXQXLXGXXPVXXQQF

SEQ ID NO: 2880 - protein, 20 aa, Artificial
  Peptide with targeting and/or antimicrobial activity
  mod_res (1)..(1): Aminoisobutyric acid
  mod_res (3)..(3): Aminoisobutyric acid
  mod_res (5)..(5): Aminoisobutyric acid
  mod_res (8)..(8): Aminoisobutyric acid
  mod_res (10)..(10): Aminoisobutyric acid
  mod_res (12)..(12): Aminoisobutyric acid
  mod_res (16)..(17): Aminoisobutyric acid
XAXAXAQXLXGXAPVXXQQF

SEQ ID NO: 2881 - protein, 5 aa, Artificial
  Peptide with targeting and/or antimicrobial activity
  mod_res (2)..(2): Aminoisobutyric acid
  mod_res (4)..(4): Aminoisobutyric acid
LXLXF

SEQ ID NO: 2882 - protein, 19 aa, Artificial
  Peptide with targeting and/or antimicrobial activity
  mod_res (2)..(2): Aminoisobutyric acid
  mod_res (4)..(4): Aminoisobutyric acid
  mod_res (5)..(5): Isovaline
  mod_res (9)..(10): Aminoisobutyric acid
  mod_res (13)..(13): Aminoisobutyric acid
  mod_res (14)..(14): Isovaline
  misc_feature (15)..(15): Xaa can be any naturally occurring amino acid
  mod_res (16)..(17): Aminoisobutyric acid
FXAXXLQGXXAAXPXXXQW

SEQ ID NO: 2883 - protein, 19 aa, Artificial
  Peptide with targeting and/or antimicrobial activity
  mod_res (2)..(2): Aminoisobutyric acid
  mod_res (4)..(4): Aminoisobutyric acid
  mod_res (5)..(5): Isovaline
  mod_res (8)..(9): Aminoisobutyric acid
  misc_feature (10)..(10): Xaa can be any naturally occurring amino acid
  mod_res (13)..(13): Aminoisobutyric acid
  mod_res (15)..(15): Isovaline
  mod_res (16)..(17): Isovaline
FXSXXLQGXXAAXPXXXQF

SEQ ID NO: 2884 - protein, 20 aa, Artificial
  Peptide with targeting and/or antimicrobial activity
  mod_res (1)..(1): Aminoisobutyric acid
  mod_res (3)..(3): Aminoisobutyric acid
  mod_res (5)..(6): Aminoisobutyric acid
  mod_res (8)..(8): Aminoisobutyric acid
  mod_res (10)..(10): Aminoisobutyric acid
  mod_res (13)..(13): Aminoisobutyric acid
  mod_res (16)..(17): Aminoisobutyric acid
XPXAXXQXVXGVXPVXXQQF

SEQ ID NO: 2885 - protein, 20 aa, Artificial
  Peptide with targeting and/or antimicrobial activity
  mod_res (1)..(1): Aminoisobutyric acid
  mod_res (3)..(3): Aminoisobutyric acid
  mod_res (5)..(6): Aminoisobutyric acid
  mod_res (8)..(8): Aminoisobutyric acid
  mod_res (10)..(10): Aminoisobutyric acid
  mod_res (13)..(13): Aminoisobutyric acid
  mod_res (16)..(17): Aminoisobutyric acid
XPXAXXQXVXGLXPVXXQQF

SEQ ID NO: 2886 - protein, 20 aa, Artificial
  Peptide with targeting and/or antimicrobial activity
  mod_res (1)..(1): Aminoisobutyric acid
  mod_res (3)..(3): Aminoisobutyric acid
  mod_res (5)..(6): Aminoisobutyric acid
  mod_res (8)..(8): Aminoisobutyric acid
  mod_res (10)..(10): Aminoisobutyric acid
  mod_res (13)..(13): Aminoisobutyric acid
  mod_res (16)..(17): Aminoisobutyric acid
XPXAXXQXIXGLXPVXXQQF

SEQ ID NO: 2887 - protein, 20 aa, Artificial
  Peptide with targeting and/or antimicrobial activity
  mod_res (1)..(1): Aminoisobutyric acid
  mod_res (3)..(3): Aminoisobutyric acid
  mod_res (5)..(6): Aminoisobutyric acid
  mod_res (8)..(8): Aminoisobutyric acid
  mod_res (10)..(10): Aminoisobutyric acid
  mod_res (13)..(13): Aminoisobutyric acid
  mod_res (16)..(16): Aminoisobutyric acid
XPXAXXQXIXGLXPVXVQQF

SEQ ID NO: 2888 - protein, 10 aa, Artificial
  Peptide with targeting and/or antimicrobial activity
  mod_res (1)..(1): Aminoisobutyric acid
  mod_res (5)..(5): Aminoisobutyric acid
  mod_res (9)..(9): Aminoisobutyric acid
XNIIXPLLXP

SEQ ID NO: 2889 - protein, 8 aa, Artificial
  Peptide with targeting and/or antimicrobial activity
  mod_res (1)..(1): Aminoisobutyric acid
  mod_res (5)..(5): Aminoisobutyric acid
XNIIXPLV

SEQ ID NO: 2890 - protein, 15 aa, Artificial
  Peptide with targeting and/or antimicrobial activity
  mod_res (2)..(4): Aminoisobutyric acid
  mod_res (8)..(9): Aminoisobutyric acid
  mod_res (10)..(10): Hydroxyproline
  mod_res (12)..(12): Isovaline
  mod_res (13)..(13): Hydroxyproline
FXXXVGLXXXQXXAF

SEQ ID NO: 2891 - protein, 15 aa, Artificial
  Peptide with targeting and/or antimicrobial activity
  mod_res (2)..(4): Aminoisobutyric acid
  mod_res (8)..(9): Aminoisobutyric acid
  mod_res (10)..(10): Hydroxyproline
  mod_res (12)..(12): Isovaline
  mod_res (13)..(13): Hydroxyproline
  misc_feature (14)..(14): Xaa can be any naturally occurring amino acid
FXXXVGLXXXQXXXF

SEQ ID NO: 2892 - protein, 20 aa, Artificial
  Peptide with targeting and/or antimicrobial activity
  mod_res (1)..(1): Aminoisobutyric acid
  mod_res (3)..(3): Aminoisobutyric acid
  mod_res (5)..(5): Aminoisobutyric acid
  mod_res (8)..(8): Aminoisobutyric acid
  mod_res (10)..(10): Aminoisobutyric acid
  mod_res (12)..(13): Aminoisobutyric acid
  mod_res (16)..(17): Aminoisobutyric acid
XAXAXAQXLXGXXPVXXQQF

SEQ ID NO: 2893 - protein, 20 aa, Artificial
  Peptide with targeting and/or antimicrobial activity
  mod_res (1)..(1): Aminoisobutyric acid
  mod_res (3)..(3): Aminoisobutyric acid
  mod_res (5)..(5): Aminoisobutyric acid
  mod_res (8)..(8): Aminoisobutyric acid
  mod_res (10)..(10): Aminoisobutyric acid
  mod_res (12)..(13): Aminoisobutyric acid
  mod_res (16)..(16): Aminoisobutyric acid
  mod_res (17)..(17): Hydroxyproline
XAXAXAQXLXGXXPVXXQQF

SEQ ID NO: 2894 - protein, 20 aa, Artificial
  Peptide with targeting and/or antimicrobial activity
  mod_res (1)..(1): Aminoisobutyric acid
  mod_res (3)..(3): Aminoisobutyric acid
  mod_res (5)..(6): Aminoisobutyric acid
  mod_res (8)..(8): Aminoisobutyric acid
  mod_res (10)..(10): Aminoisobutyric acid
  mod_res (12)..(13): Aminoisobutyric acid
  mod_res (16)..(17): Aminoisobutyric acid
XAXAXXQXLXGXXPVXXQQF

SEQ ID NO: 2895 - protein, 20 aa, Artificial
  Peptide with targeting and/or antimicrobial activity
  mod_res (1)..(1): Aminoisobutyric acid
  mod_res (3)..(3): Aminoisobutyric acid
  mod_res (5)..(6): Aminoisobutyric acid
  mod_res (8)..(8): Aminoisobutyric acid
  mod_res (10)..(10): Aminoisobutyric acid
  mod_res (12)..(13): Aminoisobutyric acid
  mod_res (16)..(16): Aminoisobutyric acid
  mod_res (17)..(17): Isovaline
XAXAXXQXLXGXXPVXXQQF

SEQ ID NO: 2896 - protein, 15 aa, Artificial
  Peptide with targeting and/or antimicrobial activity
  mod_res (2)..(4): Aminoisobutyric acid
  mod_res (8)..(9): Aminoisobutyric acid
  mod_res (10)..(10): Hydroxyproline
  mod_res (12)..(12): Isovaline
  mod_res (13)..(13): Hydroxyproline
FXXXVGLXXXQXXAF

SEQ ID NO: 2897 - protein, 15 aa, Artificial
  Peptide with targeting and/or antimicrobial activity
  mod_res (2)..(4): Aminoisobutyric acid
  mod_res (8)..(9): Aminoisobutyric acid
  mod_res (10)..(10): Hydroxyproline
  mod_res (12)..(12): Isovaline
  mod_res (13)..(13): Hydroxyproline
  misc_feature (14)..(14): Xaa can be any naturally occurring amino acid
FXXXVGLXXXQXXXF

SEQ ID NO: 2898 - protein, 20 aa, Artificial
  Peptide with targeting and/or antimicrobial activity
  mod_res (1)..(1): Aminoisobutyric acid
  mod_res (3)..(3): Aminoisobutyric acid
  mod_res (5)..(5): Aminoisobutyric acid
  mod_res (8)..(8): Aminoisobutyric acid
  mod_res (10)..(10): Aminoisobutyric acid
  mod_res (12)..(13): Aminoisobutyric acid
  mod_res (16)..(17): Aminoisobutyric acid
XPXAXAQXVXGXXPVXXEQV

SEQ ID NO: 2899 - protein, 20 aa, Artificial
  Peptide with targeting and/or antimicrobial activity
  mod_res (1)..(1): Aminoisobutyric acid
  mod_res (3)..(3): Aminoisobutyric acid
  mod_res (5)..(5): Aminoisobutyric acid
  mod_res (8)..(8): Aminoisobutyric acid
  mod_res (10)..(10): Aminoisobutyric acid
  mod_res (12)..(13): Aminoisobutyric acid
  mod_res (16)..(17): Aminoisobutyric acid
XPXAXAQXLXGXXPVXXEQV

SEQ ID NO: 2900 - protein, 20 aa, Artificial
  Peptide with targeting and/or antimicrobial activity
  mod_res (1)..(1): Aminoisobutyric acid
  mod_res (3)..(3): Aminoisobutyric acid
  mod_res (5)..(6): Aminoisobutyric acid
  mod_res (8)..(8): Aminoisobutyric acid
  mod_res (10)..(10): Aminoisobutyric acid
  mod_res (12)..(12): Aminoisobutyric acid
  mod_res (16)..(17): Aminoisobutyric acid
XPXAXXQXVXGXAPVXXEQL

SEQ ID NO: 2901 - protein, 20 aa, Artificial
  Peptide with targeting and/or antimicrobial activity
  mod_res (1)..(1): Aminoisobutyric acid
  mod_res (3)..(3): Aminoisobutyric acid
  mod_res (5)..(5): Aminoisobutyric acid
  mod_res (8)..(8): Aminoisobutyric acid
  mod_res (10)..(10): Aminoisobutyric acid
  mod_res (12)..(13): Aminoisobutyric acid
  mod_res (16)..(17): Aminoisobutyric acid
XPXAXAQXLXGXXPVXXEQL

SEQ ID NO: 2902 - protein, 20 aa, Artificial
  Peptide with targeting and/or antimicrobial activity
  mod_res (1)..(1): Aminoisobutyric acid
  mod_res (3)..(3): Aminoisobutyric acid
  mod_res (5)..(6): Aminoisobutyric acid
  mod_res (8)..(8): Aminoisobutyric acid
  mod_res (10)..(10): Aminoisobutyric acid
  mod_res (12)..(13): Aminoisobutyric acid
  mod_res (16)..(17): Aminoisobutyric acid
XPXAXXQXLXGXXPVXXEQV

SEQ ID NO: 2903 - protein, 20 aa, Artificial
  Peptide with targeting and/or antimicrobial activity
  mod_res (1)..(1): Aminoisobutyric acid
  mod_res (3)..(3): Aminoisobutyric acid
  mod_res (5)..(5): Aminoisobutyric acid
  mod_res (8)..(8): Aminoisobutyric acid
  mod_res (10)..(10): Aminoisobutyric acid
  mod_res (12)..(13): Aminoisobutyric acid
  mod_res (16)..(17): Aminoisobutyric acid
  mod_res (20)..(20): Isovaline
XPXAXAQXLXGXXPVXXEQX

SEQ ID NO: 2904 - protein, 20 aa, Artificial
  Peptide with targeting and/or antimicrobial activity
  mod_res (1)..(1): Aminoisobutyric acid
  mod_res (3)..(3): Aminoisobutyric acid
  mod_res (5)..(6): Aminoisobutyric acid
  mod_res (8)..(8): Aminoisobutyric acid
  mod_res (10)..(10): Aminoisobutyric acid
  mod_res (12)..(13): Aminoisobutyric acid
  mod_res (16)..(17): Aminoisobutyric acid
XPXAXXQXLXGXXPVXXEQI

SEQ ID NO: 2905 - protein, 20 aa, Artificial
  Peptide with targeting and/or antimicrobial activity
  mod_res (1)..(1): Aminoisobutyric acid
  mod_res (3)..(3): Aminoisobutyric acid
  mod_res (5)..(5): Aminoisobutyric acid
  mod_res (8)..(8): Aminoisobutyric acid
  mod_res (10)..(10): Aminoisobutyric acid
  mod_res (12)..(13): Aminoisobutyric acid
  mod_res (16)..(17): Aminoisobutyric acid
XPXAXAQXVXGXXPVXXQQV

SEQ ID NO: 2906 - protein, 20 aa, Artificial
  Peptide with targeting and/or antimicrobial activity
  mod_res (1)..(1): Aminoisobutyric acid
  mod_res (3)..(3): Aminoisobutyric acid
  mod_res (5)..(5): Aminoisobutyric acid
  mod_res (8)..(8): Aminoisobutyric acid
  mod_res (10)..(10): Aminoisobutyric acid
  mod_res (12)..(13): Aminoisobutyric acid
  mod_res (16)..(17): Aminoisobutyric acid
XPXAXAQXLXGXXPVXXQQV

SEQ ID NO: 2907 - protein, 20 aa, Artificial
  Peptide with targeting and/or antimicrobial activity
  mod_res (1)..(1): Aminoisobutyric acid
  mod_res (3)..(3): Aminoisobutyric acid
  mod_res (5)..(5): Aminoisobutyric acid
  mod_res (8)..(8): Aminoisobutyric acid
  mod_res (10)..(10): Aminoisobutyric acid
  mod_res (12)..(13): Aminoisobutyric acid
  mod_res (16)..(17): Aminoisobutyric acid
XPXAXAQXVXGXXPVXXQQL

SEQ ID NO: 2908 - protein, 20 aa, Artificial
  Peptide with targeting and/or antimicrobial activity
  mod_res (1)..(1): Aminoisobutyric acid
  mod_res (3)..(3): Aminoisobutyric acid
  mod_res (5)..(5): Aminoisobutyric acid
  mod_res (8)..(8): Aminoisobutyric acid
  mod_res (10)..(10): Aminoisobutyric acid
  mod_res (12)..(13): Aminoisobutyric acid
  mod_res (16)..(17): Aminoisobutyric acid
XPXAXAQXLXGXXPVXXQQL

SEQ ID NO: 2909 - protein, 20 aa, Artificial
  Peptide with targeting and/or antimicrobial activity
  mod_res (1)..(1): Aminoisobutyric acid
  mod_res (3)..(3): Aminoisobutyric acid
  mod_res (5)..(6): Aminoisobutyric acid
  mod_res (8)..(8): Aminoisobutyric acid
  mod_res (10)..(10): Aminoisobutyric acid
  mod_res (12)..(13): Aminoisobutyric acid
  mod_res (16)..(17): Aminoisobutyric acid
XPXAXXQXLXGXXPVXXQQV

SEQ ID NO: 2910 - protein, 20 aa, Artificial
  Peptide with targeting and/or antimicrobial activity
  mod_res (1)..(1): Aminoisobutyric acid
  mod_res (3)..(3): Aminoisobutyric acid
  mod_res (5)..(6): Aminoisobutyric acid
  mod_res (8)..(8): Aminoisobutyric acid
  mod_res (10)..(10): Aminoisobutyric acid
  mod_res (12)..(13): Aminoisobutyric acid
  mod_res (16)..(17): Aminoisobutyric acid
XPXAXXQXVXGXXPVXXQQV

SEQ ID NO: 2911 - protein, 20 aa, Artificial
  Peptide with targeting and/or antimicrobial activity
  mod_res (1)..(1): Aminoisobutyric acid
  mod_res (3)..(3): Aminoisobutyric acid
  mod_res (5)..(6): Aminoisobutyric acid
  mod_res (8)..(8): Aminoisobutyric acid
  mod_res (10)..(10): Aminoisobutyric acid
  mod_res (12)..(13): Aminoisobutyric acid
  mod_res (16)..(17): Aminoisobutyric acid
XPXAXXQXLXGXXPVXXQQL

SEQ ID NO: 2912 - protein, 20 aa, Artificial
  Peptide with targeting and/or antimicrobial activity
  mod_res (1)..(1): Aminoisobutyric acid
  mod_res (3)..(3): Aminoisobutyric acid
  mod_res (5)..(6): Aminoisobutyric acid
  mod_res (8)..(8): Aminoisobutyric acid
  mod_res (10)..(10): Aminoisobutyric acid
  mod_res (12)..(13): Aminoisobutyric acid
  mod_res (16)..(17): Aminoisobutyric acid
XPXAXXQXVXGXXPVXXQQL

SEQ ID NO: 2913 - protein, 20 aa, Artificial
  Peptide with targeting and/or antimicrobial activity
  mod_res (1)..(1): Aminoisobutyric acid
  mod_res (3)..(3): Aminoisobutyric acid
  mod_res (5)..(6): Aminoisobutyric acid
  mod_res (8)..(8): Aminoisobutyric acid
  mod_res (10)..(10): Aminoisobutyric acid
  mod_res (12)..(13): Aminoisobutyric acid
  mod_res (16)..(17): Aminoisobutyric acid
XPXAXXQXLXGXXPVXXQQI

SEQ ID NO: 2914 - protein, 20 aa, Artificial
  Peptide with targeting and/or antimicrobial activity
  mod_res (1)..(1): Aminoisobutyric acid
  mod_res (3)..(3): Aminoisobutyric acid
  mod_res (5)..(6): Aminoisobutyric acid
  mod_res (8)..(8): Aminoisobutyric acid
  mod_res (10)..(10): Aminoisobutyric acid
  mod_res (12)..(13): Aminoisobutyric acid
  mod_res (16)..(17): Aminoisobutyric acid
XPXAXXQXVXGXXPVXXQQI

SEQ ID NO: 2915 - protein, 20 aa, Artificial
  Peptide with targeting and/or antimicrobial activity
  mod_res (1)..(1): Aminoisobutyric acid
  mod_res (3)..(3): Aminoisobutyric acid
  mod_res (5)..(6): Aminoisobutyric acid
  mod_res (8)..(8): Aminoisobutyric acid
  misc_feature (9)..(10): Xaa can be any naturally occurring amino acid
  mod_res (13)..(13): Aminoisobutyric acid
  mod_res (16)..(17): Aminoisobutyric acid
XAXAXAQXXXGLXPVXXQQF

SEQ ID NO: 2916 - protein, 11 aa, Artificial
  Peptide with targeting and/or antimicrobial activity
  mod_res (1)..(1): Aminoisobutyric acid
  mod_res (5)..(5): Aminoisobutyric acid
  mod_res (8)..(9): Aminoisobutyric acid
XNLLXPLXXPL

SEQ ID NO: 2917 - protein, 11 aa, Artificial
  Peptide with targeting and/or antimicrobial activity
  mod_res (1)..(1): Aminoisobutyric acid
  mod_res (5)..(5): Aminoisobutyric acid
  mod_res (9)..(9): Aminoisobutyric acid
XNLLXPVLXPV

SEQ ID NO: 2918 - protein, 11 aa, Artificial
  Peptide with targeting and/or antimicrobial activity
  mod_res (1)..(1): Aminoisobutyric acid
  mod_res (5)..(5): Aminoisobutyric acid
  mod_res (9)..(9): Aminoisobutyric acid
XNVLXPLLXPV

SEQ ID NO: 2919 - protein, 11 aa, Artificial
  Peptide with targeting and/or antimicrobial activity
  mod_res (1)..(1): Aminoisobutyric acid
  mod_res (5)..(5): Aminoisobutyric acid
  mod_res (9)..(9): Aminoisobutyric acid
XNLVXPLLXPV

SEQ ID NO: 2920 - protein, 11 aa, Artificial
  Peptide with targeting and/or antimicrobial activity
  mod_res (1)..(1): Aminoisobutyric acid
  mod_res (5)..(5): Aminoisobutyric acid
  mod_res (8)..(8): Aminoisobutyric acid
XNLLXPVXVPL

SEQ ID NO: 2921 - protein, 11 aa, Artificial
  Peptide with targeting and/or antimicrobial activity
BNVLBPLBVPL

SEQ ID NO: 2922 - protein, 11 aa, Artificial
  Peptide with targeting and/or antimicrobial activity
  mod_res (1)..(1): Aminoisobutyric acid
  mod_res (5)..(5): Aminoisobutyric acid
  mod_res (8)..(8): Aminoisobutyric acid
XNLVXPLXVPL

SEQ ID NO: 2923 - protein, 11 aa, Artificial
  Peptide with targeting and/or antimicrobial activity
  mod_res (1)..(1): Aminoisobutyric acid
  mod_res (5)..(5): Aminoisobutyric acid
  mod_res (8)..(8): Aminoisobutyric acid
XNLLXPLXVPV

SEQ ID NO: 2924 - protein, 20 aa, Artificial
  Peptide with targeting and/or antimicrobial activity
  mod_res (1)..(1): Aminoisobutyric acid
  mod_res (3)..(3): Aminoisobutyric acid
  mod_res (5)..(5): Aminoisobutyric acid
  mod_res (8)..(8): Aminoisobutyric acid
  mod_res (10)..(10): Aminoisobutyric acid
  mod_res (12)..(13): Aminoisobutyric acid
  mod_res (16)..(17): Aminoisobutyric acid
XAXAXAQXLXGXXPVXXQQF

SEQ ID NO: 2925 - protein, 20 aa, Artificial
  Peptide with targeting and/or antimicrobial activity
  mod_res (1)..(1): Aminoisobutyric acid
  mod_res (3)..(3): Aminoisobutyric acid
  mod_res (5)..(5): Aminoisobutyric acid
  mod_res (8)..(8): Aminoisobutyric acid
  mod_res (10)..(10): Aminoisobutyric acid
  mod_res (12)..(13): Aminoisobutyric acid
  mod_res (16)..(16): Aminoisobutyric acid
  mod_res (17)..(17): Isovaline
XAXAXAQXLXGXXPVXXQQF

SEQ ID NO: 2926 - protein, 20 aa, Artificial
  Peptide with targeting and/or antimicrobial activity
  mod_res (1)..(1): Aminoisobutyric acid
  mod_res (3)..(3): Aminoisobutyric acid
  mod_res (5)..(5): Aminoisobutyric acid
  mod_res (8)..(8): Aminoisobutyric acid
  mod_res (10)..(10): Aminoisobutyric acid
  mod_res (12)..(13): Aminoisobutyric acid
  mod_res (16)..(17): Aminoisobutyric acid
XAXAXAQXIXGXXPVXXQQF

SEQ ID NO: 2927 - protein, 20 aa, Artificial
  Peptide with targeting and/or antimicrobial activity
  mod_res (1)..(1): Aminoisobutyric acid
  mod_res (3)..(3): Aminoisobutyric acid
  mod_res (5)..(5): Aminoisobutyric acid
  mod_res (8)..(8): Aminoisobutyric acid
  mod_res (10)..(10): Aminoisobutyric acid
  mod_res (12)..(13): Aminoisobutyric acid
  mod_res (16)..(16): Aminoisobutyric acid
  mod_res (17)..(17): Isovaline
XAXAXAQXIXGXXPVXXQQF

SEQ ID NO: 2928 - protein, 20 aa, Artificial
  Peptide with targeting and/or antimicrobial activity
  mod_res (1)..(1): Aminoisobutyric acid
  mod_res (3)..(3): Aminoisobutyric acid
  mod_res (5)..(5): Aminoisobutyric acid
  mod_res (8)..(8): Aminoisobutyric acid
  mod_res (10)..(10): Aminoisobutyric acid
  mod_res (13)..(13): Aminoisobutyric acid
  mod_res (16)..(17): Aminoisobutyric acid
XAXAXAQXLXGLXPVXXQQF

SEQ ID NO: 2929 - protein, 20 aa, Artificial
  Peptide with targeting and/or antimicrobial activity
  mod_res (1)..(1): Aminoisobutyric acid
  mod_res (3)..(3): Aminoisobutyric acid
  mod_res (5)..(5): Aminoisobutyric acid
  mod_res (8)..(8): Aminoisobutyric acid
  mod_res (10)..(10): Aminoisobutyric acid
  mod_res (13)..(13): Aminoisobutyric acid
  mod_res (16)..(16): Aminoisobutyric acid
  mod_res (17)..(17): Isovaline
XAXAXAQXLXGLXPVXXQQF

SEQ ID NO: 2930 - protein, 20 aa, Artificial
  Peptide with targeting and/or antimicrobial activity
  mod_res (1)..(1): Aminoisobutyric acid
  mod_res (3)..(3): Aminoisobutyric acid
  mod_res (5)..(5): Aminoisobutyric acid
  mod_res (8)..(8): Aminoisobutyric acid
  mod_res (10)..(10): Aminoisobutyric acid
  mod_res (13)..(13): Aminoisobutyric acid
  mod_res (16)..(17): Aminoisobutyric acid
XAXAXAQXIXGLXPVXXQQF

SEQ ID NO: 2931 - protein, 20 aa, Artificial
  Peptide with targeting and/or antimicrobial activity
  mod_res (1)..(1): Aminoisobutyric acid
  mod_res (3)..(3): Aminoisobutyric acid
  mod_res (5)..(5): Aminoisobutyric acid
  mod_res (8)..(8): Aminoisobutyric acid
  mod_res (10)..(10): Aminoisobutyric acid
  mod_res (13)..(13): Aminoisobutyric acid
  mod_res (16)..(16): Aminoisobutyric acid
  mod_res (17)..(17): Isovaline
XAXAXAQXIXGLXPVXXQQF

SEQ ID NO: 2932 - protein, 20 aa, Artificial
  Peptide with targeting and/or antimicrobial activity
BABABAQBLBGBBPVBBEQF

SEQ ID NO: 2933 - protein, 20 aa, Artificial
  Peptide with targeting and/or antimicrobial activity
  mod_res (1)..(1): Aminoisobutyric acid
  mod_res (3)..(3): Aminoisobutyric acid
  mod_res (5)..(5): Aminoisobutyric acid
  mod_res (8)..(8): Aminoisobutyric acid
  mod_res (10)..(10): Aminoisobutyric acid
  mod_res (12)..(13): Aminoisobutyric acid
  mod_res (16)..(16): Aminoisobutyric acid
  mod_res (17)..(17): Isovaline
XAXAXAQXLXGXXPVXXEQF

SEQ ID NO: 2934 - protein, 7 aa, Artificial
  Peptide with targeting and/or antimicrobial activity
  mod_res (4)..(4): Aminoisobutyric acid
GGLXGIL

SEQ ID NO: 2935 - protein, 7 aa, Artificial
  Peptide with targeting and/or antimicrobial activity
  mod_res (4)..(4): Aminoisobutyric acid
GGLXGLL

SEQ ID NO: 2936 - protein, 11 aa, Artificial
  Peptide with targeting and/or antimicrobial activity
  mod_res (1)..(1): Aminoisobutyric acid
  mod_res (4)..(4): Aminoisobutyric acid
  mod_res (8)..(8): Aminoisobutyric acid
XGLXGGLXGIL

SEQ ID NO: 2937 - protein, 18 aa, Artificial
  Peptide with targeting and/or antimicrobial activity
  mod_res (1)..(1): Aminoisobutyric acid
  mod_res (4)..(5): Aminoisobutyric acid
  mod_res (7)..(7): Isovaline
  mod_res (9)..(9): Aminoisobutyric acid
  mod_res (11)..(12): Aminoisobutyric acid
  mod_res (15)..(16): Aminoisobutyric acid
XSAXXQXLXAXXPLXXQI

SEQ ID NO: 2938 - protein, 18 aa, Artificial
  Peptide with targeting and/or antimicrobial activity
  mod_res (1)..(1): Aminoisobutyric acid
  mod_res (4)..(4): Aminoisobutyric acid
  mod_res (5)..(5): Isovaline
  mod_res (7)..(7): Aminoisobutyric acid
  mod_res (9)..(9): Aminoisobutyric acid
  mod_res (11)..(12): Aminoisobutyric acid
  mod_res (15)..(16): Aminoisobutyric acid
XSAXXQXLXAXXPLXXQI

SEQ ID NO: 2939 - protein, 18 aa, Artificial
  Peptide with targeting and/or antimicrobial activity
  mod_res (1)..(1): Aminoisobutyric acid
  mod_res (4)..(5): Aminoisobutyric acid
  mod_res (7)..(7): Aminoisobutyric acid
  mod_res (9)..(9): Aminoisobutyric acid
  mod_res (11)..(11): Isovaline
  mod_res (12)..(12): Aminoisobutyric acid
  mod_res (15)..(16): Aminoisobutyric acid
XSAXXQXLXAXXPLXXQI

SEQ ID NO: 2940 - protein, 18 aa, Artificial
  Peptide with targeting and/or antimicrobial activity
  mod_res (1)..(1): Aminoisobutyric acid
  mod_res (4)..(4): Aminoisobutyric acid
  mod_res (5)..(5): Isovaline
  mod_res (7)..(7): Isovaline
  mod_res (9)..(9): Aminoisobutyric acid
  mod_res (11)..(12): Aminoisobutyric acid
  mod_res (15)..(16): Aminoisobutyric acid
XSAXXQXLXAXXPLXXQL

SEQ ID NO: 2941 - protein, 18 aa, Artificial
  Peptide with targeting and/or antimicrobial activity
  mod_res (1)..(1): Aminoisobutyric acid
  mod_res (4)..(5): Aminoisobutyric acid
  mod_res (7)..(7): Isovaline
  mod_res (9)..(9): Aminoisobutyric acid
  mod_res (11)..(11): Isovaline
  mod_res (12)..(12): Aminoisobutyric acid
  mod_res (15)..(16): Aminoisobutyric acid
XSAXXQXLXAXXPLXXQL

SEQ ID NO: 2942 - protein, 18 aa, Artificial
  Peptide with targeting and/or antimicrobial activity
  mod_res (1)..(1): Aminoisobutyric acid
  mod_res (4)..(4): Aminoisobutyric acid
  mod_res (5)..(5): Isovaline
  mod_res (7)..(7): Aminoisobutyric acid
  mod_res (9)..(9): Aminoisobutyric acid
  mod_res (11)..(11): Isovaline
  mod_res (12)..(12): Aminoisobutyric acid
  mod_res (15)..(16): Aminoisobutyric acid
XSAXXQXLXAXXPLXXQL

SEQ ID NO: 2943 - protein, 18 aa, Artificial
  Peptide with targeting and/or antimicrobial activity
  mod_res (1)..(1): Aminoisobutyric acid
  mod_res (4)..(4): Aminoisobutyric acid
  mod_res (5)..(5): Isovaline
  mod_res (7)..(7): Isovaline
  mod_res (9)..(9): Aminoisobutyric acid
  mod_res (11)..(12): Aminoisobutyric acid
  mod_res (15)..(16): Aminoisobutyric acid
XSAXXQXLXAXXPLXXQI

SEQ ID NO: 2944 - protein, 18 aa, Artificial
  Peptide with targeting and/or antimicrobial activity
  mod_res (1)..(1): Aminoisobutyric acid
  mod_res (4)..(5): Aminoisobutyric acid
  mod_res (7)..(7): Isovaline
  mod_res (9)..(9): Aminoisobutyric acid
  mod_res (11)..(11): Isovaline
  mod_res (12)..(12): Aminoisobutyric acid
  mod_res (15)..(16): Aminoisobutyric acid
XSAXXQXLXAXXPLXXQI

SEQ ID NO: 2945 - protein, 18 aa, Artificial
  Peptide with targeting and/or antimicrobial activity
  mod_res (1)..(1): Aminoisobutyric acid
  mod_res (4)..(4): Aminoisobutyric acid
  mod_res (5)..(5): Isovaline
  mod_res (7)..(7): Aminoisobutyric acid
  mod_res (9)..(9): Aminoisobutyric acid
  mod_res (11)..(11): Isovaline
  mod_res (12)..(12): Aminoisobutyric acid
  mod_res (15)..(16): Aminoisobutyric acid
XSAXXQXLXAXXPLXXQI

SEQ ID NO: 2946 - protein, 18 aa, Artificial
  Peptide with targeting and/or antimicrobial activity
  mod_res (1)..(1): Aminoisobutyric acid
  mod_res (4)..(4): Aminoisobutyric acid
  mod_res (5)..(5): Isovaline
  mod_res (7)..(7): Isovaline
  mod_res (9)..(9): Aminoisobutyric acid
  mod_res (11)..(11): Isovaline
  mod_res (12)..(12): Aminoisobutyric acid
  mod_res (15)..(16): Aminoisobutyric acid
XSAXXQXLXAXXPLXXQL

SEQ ID NO: 2947 - protein, 18 aa, Artificial
  Peptide with targeting and/or antimicrobial activity
  mod_res (1)..(1): Aminoisobutyric acid
  mod_res (4)..(4): Aminoisobutyric acid
  mod_res (5)..(5): Isovaline
  mod_res (7)..(7): Isovaline
  mod_res (9)..(9): Aminoisobutyric acid
  mod_res (11)..(11): Isovaline
  mod_res (12)..(12): Aminoisobutyric acid
  mod_res (15)..(16): Aminoisobutyric acid
XSAXXQXLXAXXPLXXQI

SEQ ID NO: 2948 - protein, 20 aa, Artificial
  Peptide with targeting and/or antimicrobial activity
  mod_res (1)..(1): Aminoisobutyric acid
  mod_res (3)..(3): Aminoisobutyric acid
  mod_res (5)..(5): Aminoisobutyric acid
  mod_res (8)..(8): Aminoisobutyric acid
  mod_res (10)..(10): Aminoisobutyric acid
  mod_res (16)..(17): Aminoisobutyric acid
XAXAXAQXVXGLAPVXXQQF

SEQ ID NO: 2949 - protein, 20 aa, Artificial
  Peptide with targeting and/or antimicrobial activity
  mod_res (1)..(1): Aminoisobutyric acid
  mod_res (3)..(3): Aminoisobutyric acid
  mod_res (5)..(5): Aminoisobutyric acid
  mod_res (8)..(8): Aminoisobutyric acid
  mod_res (10)..(10): Aminoisobutyric acid
  mod_res (13)..(13): Aminoisobutyric acid
  mod_res (16)..(17): Aminoisobutyric acid
XGXAXAQXVXGLXPVXXQQF

SEQ ID NO: 2950 - protein, 20 aa, Artificial
  Peptide with targeting and/or antimicrobial activity
  mod_res (1)..(1): Aminoisobutyric acid
  mod_res (3)..(3): Aminoisobutyric acid
  mod_res (5)..(5): Aminoisobutyric acid
  mod_res (8)..(8): Aminoisobutyric acid
  mod_res (10)..(10): Aminoisobutyric acid
  mod_res (13)..(13): Aminoisobutyric acid
  mod_res (16)..(17): Aminoisobutyric acid
XAXAXAQXVXGLXPAXXQQF

SEQ ID NO: 2951 - protein, 20 aa, Artificial
  Peptide with targeting and/or antimicrobial activity
AABABAQBVBGLBPVBBQQF

SEQ ID NO: 2952 - protein, 20 aa, Artificial
  Peptide with targeting and/or antimicrobial activity
BAAABAQBVBGLBPVBBQQF

SEQ ID NO: 2953 - protein, 19 aa, Artificial
  Peptide with targeting and/or antimicrobial activity
BABABQBVBGLBPVBBQQF

SEQ ID NO: 2954 - protein, 20 aa, Artificial
  Peptide with targeting and/or antimicrobial activity
  misc_feature (17)..(17): Xaa can be any naturally occurring amino acid
BABABAQBVBGLBPVBXQQF

SEQ ID NO: 2955 - protein, 20 aa, Artificial
  Peptide with targeting and/or antimicrobial activity
BABABBQBVBGLBPVBBQQF

SEQ ID NO: 2956 - protein, 20 aa, Artificial
  Peptide with targeting and/or antimicrobial activity
  misc_feature (17)..(17): Xaa can be any naturally occurring amino acid
BABABAQBVBGLBPVBXQQF

SEQ ID NO: 2957 - protein, 19 aa, Artificial
  Peptide with targeting and/or antimicrobial activity
BGFBBQBBBSLBPVBBQQL

SEQ ID NO: 2958 - protein, 19 aa, Artificial
  Peptide with targeting and/or antimicrobial activity
  misc_feature (16)..(16): Xaa can be any naturally occurring amino acid
BGFBBQBBBSLBPVBXQQL

SEQ ID NO: 2959 - protein, 14 aa, Artificial
  Peptide with targeting and/or antimicrobial activity
PZZABBIABBAMAE

SEQ ID NO: 2960 - protein, 14 aa, Artificial
  Peptide with targeting and/or antimicrobial activity
PZZABBVABBAMAE

SEQ ID NO: 2961 - protein, 14 aa, Artificial
  Peptide with targeting and/or antimicrobial activity
PZZABBIABAAMAE

SEQ ID NO: 2962 - protein, 14 aa, Artificial
  Peptide with targeting and/or antimicrobial activity
PZZABBVABAAMAE

SEQ ID NO: 2963 - protein, 14 aa, Artificial
  Peptide with targeting and/or antimicrobial activity
PZZABBIABBAMAE

SEQ ID NO: 2964 - protein, 11 aa, Artificial
  Peptide with targeting and/or antimicrobial activity
  misc_feature (4)..(4): Xaa can be any naturally occurring amino acid
  misc_feature (7)..(8): Xaa can be any naturally occurring amino acid
BNVXBPXXBPV

SEQ ID NO: 2965 - protein, 11 aa, Artificial
  Peptide with targeting and/or antimicrobial activity
  misc_feature (7)..(8): Xaa can be any naturally occurring amino acid
  misc_feature (11)..(11): Xaa can be any naturally occurring amino acid
BNVVBPXXBPX

SEQ ID NO: 2966 - protein, 11 aa, Artificial
  Peptide with targeting and/or antimicrobial activity
  misc_feature (7)..(8): Xaa can be any naturally occurring amino acid
  misc_feature (11)..(11): Xaa can be any naturally occurring amino acid
BNVVBPXXBPX

SEQ ID NO: 2967 - protein, 11 aa, Artificial
  Peptide with targeting and/or antimicrobial activity
  misc_feature (3)..(3): Xaa can be any naturally occurring amino acid
  misc_feature (7)..(8): Xaa can be any naturally occurring amino acid
BNXVBPXXBPV

SEQ ID NO: 2968 - protein, 11 aa, Artificial
  Peptide with targeting and/or antimicrobial activity
  misc_feature (7)..(8): Xaa can be any naturally occurring amino acid
  misc_feature (11)..(11): Xaa can be any naturally occurring amino acid
BQVVBPXXBPX

SEQ ID NO: 2969 - protein, 11 aa, Artificial
  Peptide with targeting and/or antimicrobial activity
  misc_feature (4)..(4): Xaa can be any naturally occurring amino acid
  misc_feature (7)..(8): Xaa can be any naturally occurring amino acid
BQVXBPXXBPV

SEQ ID NO: 2970 - protein, 11 aa, Artificial
  Peptide with targeting and/or antimicrobial activity
  misc_feature (7)..(8): Xaa can be any naturally occurring amino acid
  misc_feature (11)..(11): Xaa can be any naturally occurring amino acid
BQVVBPXXBPX

SEQ ID NO: 2971 - protein, 11 aa, Artificial
  Peptide with targeting and/or antimicrobial activity
  misc_feature (3)..(3): Xaa can be any naturally occurring amino acid
  misc_feature (7)..(8): Xaa can be any naturally occurring amino acid
BQXVBPXXBPV

SEQ ID NO: 2972 - protein, 11 aa, Artificial
  Peptide with targeting and/or antimicrobial activity
  misc_feature (4)..(4): Xaa can be any naturally occurring amino acid
  misc_feature (7)..(8): Xaa can be any naturally occurring amino acid
  misc_feature (11)..(11): Xaa can be any naturally occurring amino acid
BNVXBPXXBPX

SEQ ID NO: 2973 - protein, 11 aa, Artificial
  Peptide with targeting and/or antimicrobial activity
  misc_feature (4)..(4): Xaa can be any naturally occurring amino acid
  misc_feature (7)..(8): Xaa can be any naturally occurring amino acid
  misc_feature (11)..(11): Xaa can be any naturally occurring amino acid
BQVXBPXXBPX

SEQ ID NO: 2974 - protein, 11 aa, Artificial
  Peptide with targeting and/or antimicrobial activity
  misc_feature (3)..(4): Xaa can be any naturally occurring amino acid
  misc_feature (7)..(8): Xaa can be any naturally occurring amino acid
BQXXBPXXBPV

SEQ ID NO: 2975 - protein, 11 aa, Artificial
  Peptide with targeting and/or antimicrobial activity
  misc_feature (4)..(4): Xaa can be any naturally occurring amino acid
  misc_feature (7)..(8): Xaa can be any naturally occurring amino acid
  misc_feature (11)..(11): Xaa can be any naturally occurring amino acid
BNVXBPXXBPX

SEQ ID NO: 2976 - protein, 11 aa, Artificial
  Peptide with targeting and/or antimicrobial activity
  misc_feature (3)..(4): Xaa can be any naturally occurring amino acid
  misc_feature (7)..(8): Xaa can be any naturally occurring amino acid
BNXXBPXXBPV

SEQ ID NO: 2977 - protein, 11 aa, Artificial
  Peptide with targeting and/or antimicrobial activity
  misc_feature (4)..(4): Xaa can be any naturally occurring amino acid
  misc_feature (7)..(8): Xaa can be any naturally occurring amino acid
  misc_feature (11)..(11): Xaa can be any naturally occurring amino acid
BNVXBPXXBPX

SEQ ID NO: 2978 - protein, 11 aa, Artificial
  Peptide with targeting and/or antimicrobial activity
  misc_feature (3)..(4): Xaa can be any naturally occurring amino acid
  misc_feature (7)..(8): Xaa can be any naturally occurring amino acid
BNXXBPXXBPV

SEQ ID NO: 2979 - protein, 11 aa, Artificial
  Peptide with targeting and/or antimicrobial activity
  misc_feature (3)..(3): Xaa can be any naturally occurring amino acid
  misc_feature (7)..(8): Xaa can be any naturally occurring amino acid
  misc_feature (11)..(11): Xaa can be any naturally occurring amino acid
BNXVBPXXBPX

SEQ ID NO: 2980 - protein, 11 aa, Artificial
  Peptide with targeting and/or antimicrobial activity
  misc_feature (4)..(4): Xaa can be any naturally occurring amino acid
  misc_feature (7)..(8): Xaa can be any naturally occurring amino acid
BQVXBPXXBPV

SEQ ID NO: 2981 - protein, 11 aa, Artificial
  Peptide with targeting and/or antimicrobial activity
  misc_feature (4)..(4): Xaa can be any naturally occurring amino acid
  misc_feature (7)..(8): Xaa can be any naturally occurring amino acid
  misc_feature (11)..(11): Xaa can be any naturally occurring amino acid
BQVXBPXXBPX

SEQ ID NO: 2982 - protein, 11 aa, Artificial
  Peptide with targeting and/or antimicrobial activity
  misc_feature (3)..(3): Xaa can be any naturally occurring amino acid
  misc_feature (7)..(8): Xaa can be any naturally occurring amino acid
  misc_feature (11)..(11): Xaa can be any naturally occurring amino acid
BQXVBPXXBPX

SEQ ID NO: 2983 - protein, 11 aa, Artificial
  Peptide with targeting and/or antimicrobial activity
  misc_feature (3)..(4): Xaa can be any naturally occurring amino acid
  misc_feature (7)..(8): Xaa can be any naturally occurring amino acid
  misc_feature (11)..(11): Xaa can be any naturally occurring amino acid
BNXXBPXXBPX

SEQ ID NO: 2984 - protein, 11 aa, Artificial
  Peptide with targeting and/or antimicrobial activity
BNIIBPLLBPI

SEQ ID NO: 2985 - protein, 11 aa, Artificial
  Peptide with targeting and/or antimicrobial activity
  misc_feature (3)..(4): Xaa can be any naturally occurring amino acid
  misc_feature (7)..(8): Xaa can be any naturally occurring amino acid
BNXXBPXXBPL

SEQ ID NO: 2986 - protein, 11 aa, Artificial
  Peptide with targeting and/or antimicrobial activity
  misc_feature (3)..(4): Xaa can be any naturally occurring amino acid
  misc_feature (7)..(8): Xaa can be any naturally occurring amino acid
  misc_feature (11)..(11): Xaa can be any naturally occurring amino acid
BQXXBPXXBPX

SEQ ID NO: 2987 - protein, 11 aa, Artificial
  Peptide with targeting and/or antimicrobial activity
  misc_feature (3)..(4): Xaa can be any naturally occurring amino acid
  misc_feature (7)..(8): Xaa can be any naturally occurring amino acid
  misc_feature (11)..(11): Xaa can be any naturally occurring amino acid
BQXXBPXXBPX

SEQ ID NO: 2988 - protein, 11 aa, Artificial
  Peptide with targeting and/or antimicrobial activity
BNILBPILBPV

SEQ ID NO: 2989 - protein, 11 aa, Artificial
  Peptide with targeting and/or antimicrobial activity
BQILBPILBPV

SEQ ID NO: 2990 - protein, 11 aa, Artificial
  Peptide with targeting and/or antimicrobial activity
BNILBPILBPL

SEQ ID NO: 2991 - protein, 11 aa, Artificial
  Peptide with targeting and/or antimicrobial activity
BQILBPILBPL

SEQ ID NO: 2992 - protein, 19 aa, Artificial
  Peptide with targeting and/or antimicrobial activity
BAABBQBBBSLBPVBIQQW

SEQ ID NO: 2993 - protein, 19 aa, Artificial
  Peptide with targeting and/or antimicrobial activity
BAABBQBBBSLBPLBIQEW

SEQ ID NO: 2994 - protein, 19 aa, Artificial
  Peptide with targeting and/or antimicrobial activity
BAABBQBBBSLBPVBIQEW

SEQ ID NO: 2995 - protein, 19 aa, Artificial
  Peptide with targeting and/or antimicrobial activity
  misc_feature (5)..(5): Xaa can be any naturally occurring amino acid
BAABXQBBBSLBPVBIQEW

SEQ ID NO: 2996 - protein, 19 aa, Artificial
  Peptide with targeting and/or antimicrobial activity
BAABBQBBBSLBPLBIQEF

SEQ ID NO: 2997 - protein, 19 aa, Artificial
  Peptide with targeting and/or antimicrobial activity
  misc_feature (5)..(5): Xaa can be any naturally occurring amino acid
BAABXQBBBSLBPLBIQEF

SEQ ID NO: 2998 - protein, 19 aa, Artificial
  Peptide with targeting and/or antimicrobial activity
BAABBQBBBSLBPVBIQEF

SEQ ID NO: 2999 - protein, 19 aa, Artificial
  Peptide with targeting and/or antimicrobial activity
  misc_feature (5)..(5): Xaa can be any naturally occurring amino acid
BAABXQBBBSLBPVBIQEF

SEQ ID NO: 3000 - protein, 18 aa, Artificial
  Peptide with targeting and/or antimicrobial activity
BGABBQBVBGLBPLBBQL

SEQ ID NO: 3001 - protein, 18 aa, Artificial
  Peptide with targeting and/or antimicrobial activity
  misc_feature (16)..(16): Xaa can be any naturally occurring amino acid
BGABBQBVBGLBPLBXQL

SEQ ID NO: 3002 - protein, 18 aa, Artificial
  Peptide with targeting and/or antimicrobial activity
  misc_feature (5)..(5): Xaa can be any naturally occurring amino acid
BGABXQBVBGLBPLBBQL

SEQ ID NO: 3003 - protein, 18 aa, Artificial
  Peptide with targeting and/or antimicrobial activity
  misc_feature (5)..(5): Xaa can be any naturally occurring amino acid
  misc_feature (16)..(16): Xaa can be any naturally occurring amino acid
BGABXQBVBGLBPLBXQL

SEQ ID NO: 3004 - protein, 18 aa, Artificial
  Peptide with targeting and/or antimicrobial activity
  misc_feature (5)..(5): Xaa can be any naturally occurring amino acid
  misc_feature (7)..(7): Xaa can be any naturally occurring amino acid
  misc_feature (16)..(16): Xaa can be any naturally occurring amino acid
BGABXQXVBGLBPLBXQL

SEQ ID NO: 3005 - protein, 18 aa, Artificial
  Peptide with targeting and/or antimicrobial activity
  misc_feature (5)..(5): Xaa can be any naturally occurring amino acid
  misc_feature (16)..(16): Xaa can be any naturally occurring amino acid
BGABXQVVBGLBPLBXQL

SEQ ID NO: 3006 - protein, 18 aa, Artificial
  Peptide with targeting and/or antimicrobial activity
BSABBQBLBGLBPLBBQV

SEQ ID NO: 3007 - protein, 18 aa, Artificial
  Peptide with targeting and/or antimicrobial activity
  misc_feature (5)..(5): Xaa can be any naturally occurring amino acid
BSABXQBLBGLBPLBBQV

SEQ ID NO: 3008 - protein, 18 aa, Artificial
  Peptide with targeting and/or antimicrobial activity
  misc_feature (5)..(5): Xaa can be any naturally occurring amino acid
  misc_feature (7)..(7): Xaa can be any naturally occurring amino acid
BSABXQXLBGLBPLBBQV

SEQ ID NO: 3009 - protein, 18 aa, Artificial
  Peptide with targeting and/or antimicrobial activity
  misc_feature (5)..(5): Xaa can be any naturally occurring amino acid
BSABXQBVBGLBPLBBQW

SEQ ID NO: 3010 - protein, 18 aa, Artificial
  Peptide with targeting and/or antimicrobial activity
  misc_feature (5)..(5): Xaa can be any naturally occurring amino acid
  misc_feature (7)..(7): Xaa can be any naturally occurring amino acid
BSABXQXVBGLBPLBBQW

SEQ ID NO: 3011 - protein, 18 aa, Artificial
  Peptide with targeting and/or antimicrobial activity
  misc_feature (4)..(5): Xaa can be any naturally occurring amino acid
BSAXXQBVBGLBPLBBQW

SEQ ID NO: 3012 - protein, 18 aa, Artificial
  Peptide with targeting and/or antimicrobial activity
  misc_feature (5)..(5): Xaa can be any naturally occurring amino acid
BSABXQBVBGLBPLBBQF

SEQ ID NO: 3013 - protein, 18 aa, Artificial
  Peptide with targeting and/or antimicrobial activity
  misc_feature (4)..(5): Xaa can be any naturally occurring amino acid
BSAXXQBVBGLBPLBBQW

SEQ ID NO: 3014 - protein, 18 aa, Artificial
  Peptide with targeting and/or antimicrobial activity
  misc_feature (5)..(5): Xaa can be any naturally occurring amino acid
  misc_feature (7)..(7): Xaa can be any naturally occurring amino acid
BSABXQXVBGLBPLBBQF

SEQ ID NO: 3015 - protein, 18 aa, Artificial
  Peptide with targeting and/or antimicrobial activity
  misc_feature (4)..(5): Xaa can be any naturally occurring amino acid
BSAXXQBVBGLBPLBBQF

SEQ ID NO: 3016 - protein, 18 aa, Artificial
  Peptide with targeting and/or antimicrobial activity
BSABBQBVBGLBPLBBQW

SEQ ID NO: 3017 - protein, 18 aa, Artificial
  Peptide with targeting and/or antimicrobial activity
  misc_feature (15)..(15): Xaa can be any naturally occurring amino acid
BAGBABQBAAAPVBXQQF

SEQ ID NO: 3018 - protein, 18 aa, Artificial
  Peptide with targeting and/or antimicrobial activity
  misc_feature (15)..(15): Xaa can be any naturally occurring amino acid
BAGABBQBAAAPVBXQQF

SEQ ID NO: 3019 - protein, 18 aa, Artificial
  Peptide with targeting and/or antimicrobial activity
BAGABBQBBGAPVBAQQF

SEQ ID NO: 3020 - protein, 18 aa, Artificial
  Peptide with targeting and/or antimicrobial activity
BASABBQBBGAPVBBQQF

SEQ ID NO: 3021 - protein, 20 aa, Artificial
  Peptide with targeting and/or antimicrobial activity
  mod_res (1)..(1): Aminoisobutyric acid
  mod_res (5)..(6): Aminoisobutyric acid
  mod_res (8)..(8): Aminoisobutyric acid
  mod_res (9)..(9): L or I
  mod_res (10)..(10): Aminoisobutyric acid
  mod_res (12)..(12): L or I
  mod_res (13)..(13): Aminoisobutyric acid
  mod_res (16)..(17): Aminoisobutyric acid
XAGAXXQXXXGXXPVXXQQF

SEQ ID NO: 3022 - protein, 20 aa, Artificial
  Peptide with targeting and/or antimicrobial activity
  mod_res (1)..(1): Aminoisobutyric acid
  mod_res (5)..(6): Aminoisobutyric acid
  mod_res (8)..(8): Aminoisobutyric acid
  mod_res (9)..(9): L or I
  mod_res (10)..(10): Aminoisobutyric acid
  mod_res (12)..(12): L or I
  mod_res (13)..(13): Aminoisobutyric acid
  mod_res (16)..(17): Aminoisobutyric acid
XASAXXQXXXGXXPVXXQQF

SEQ ID NO: 3023 - protein, 20 aa, Artificial
  Peptide with targeting and/or antimicrobial activity
  mod_res (1)..(1): Aminoisobutyric acid
  mod_res (5)..(6): Aminoisobutyric acid
  mod_res (8)..(8): Aminoisobutyric acid
  mod_res (9)..(9): L or I
  mod_res (10)..(10): Aminoisobutyric acid
  mod_res (12)..(12): L or I
  mod_res (16)..(17): Aminoisobutyric acid
XAGAXXQXXXGXAPVXXQQF

SEQ ID NO: 3024 - protein, 20 aa, Artificial
  Peptide with targeting and/or antimicrobial activity
  mod_res (1)..(1): Aminoisobutyric acid
  mod_res (5)..(6): Aminoisobutyric acid
  mod_res (8)..(8): Aminoisobutyric acid
  mod_res (9)..(9): L or I
  mod_res (10)..(10): Aminoisobutyric acid
  mod_res (12)..(12): L or I
  mod_res (13)..(13): Aminoisobutyric acid
  mod_res (16)..(16): Aminoisobutyric acid
  mod_res (17)..(17): L or I
XAGAXXQXXXGXXPVXXQQF

SEQ ID NO: 3025 - protein, 20 aa, Artificial
  Peptide with targeting and/or antimicrobial activity
  mod_res (1)..(1): Aminoisobutyric acid
  mod_res (5)..(6): Aminoisobutyric acid
  mod_res (8)..(8): Aminoisobutyric acid
  mod_res (10)..(10): Aminoisobutyric acid
  mod_res (13)..(13): Aminoisobutyric acid
  mod_res (16)..(17): Aminoisobutyric acid
XASAXXQXLXGLXPVXXQQF

SEQ ID NO: 3026 - protein, 20 aa, Artificial
  Peptide with targeting and/or antimicrobial activity
  mod_res (1)..(1): Aminoisobutyric acid
  mod_res (5)..(6): Aminoisobutyric acid
  mod_res (8)..(8): Aminoisobutyric acid
  mod_res (10)..(10): Aminoisobutyric acid
  mod_res (13)..(13): Aminoisobutyric acid
  mod_res (16)..(17): Aminoisobutyric acid
XAAAXXQXLXGLXPVXXQQF

SEQ ID NO: 3027 - protein, 20 aa, Artificial
  Peptide with targeting and/or antimicrobial activity
  mod_res (1)..(1): Aminoisobutyric acid
  mod_res (5)..(6): Aminoisobutyric acid
  mod_res (8)..(8): Aminoisobutyric acid
  mod_res (10)..(10): Aminoisobutyric acid
  mod_res (13)..(13): Aminoisobutyric acid
  mod_res (16)..(16): Aminoisobutyric acid
XAAAXXQXIXGLXPVXAQQF

SEQ ID NO: 3028 - protein, 20 aa, Artificial
  Peptide with targeting and/or antimicrobial activity
  mod_res (1)..(1): Aminoisobutyric acid
  mod_res (6)..(6): Aminoisobutyric acid
  mod_res (8)..(8): Aminoisobutyric acid
  mod_res (10)..(10): Aminoisobutyric acid
  mod_res (13)..(13): Aminoisobutyric acid
  mod_res (16)..(17): Aminoisobutyric acid
XAAAAXQXIXGLXPVXXQQF

SEQ ID NO: 3029 - protein, 20 aa, Artificial
  Peptide with targeting and/or antimicrobial activity
  mod_res (1)..(1): Aminoisobutyric acid
  mod_res (5)..(6): Aminoisobutyric acid
  misc_feature (8)..(8): Xaa can be any naturally occurring amino acid
  mod_res (10)..(10): Aminoisobutyric acid
  mod_res (13)..(13): Aminoisobutyric acid
  mod_res (16)..(17): Aminoisobutyric acid
XAAAXXQXVXGLXPVXXQQF

SEQ ID NO: 3030 - protein, 20 aa, Artificial
  Peptide with targeting and/or antimicrobial activity
  mod_res (1)..(1): Aminoisobutyric acid
  mod_res (5)..(6): Aminoisobutyric acid
  misc_feature (8)..(8): Xaa can be any naturally occurring amino acid
  mod_res (10)..(10): Aminoisobutyric acid
  mod_res (13)..(13): Aminoisobutyric acid
  mod_res (16)..(16): Aminoisobutyric acid
  mod_res (17)..(17): Isovaline
XAAAXXQXLXGLXPVXXQQF

SEQ ID NO: 3031 - protein, 20 aa, Artificial
  Peptide with targeting and/or antimicrobial activity
  mod_res (1)..(1): Aminoisobutyric acid
  misc_feature (3)..(3): Xaa can be any naturally occurring amino acid
  mod_res (5)..(6): Aminoisobutyric acid
  mod_res (8)..(8): Aminoisobutyric acid
  mod_res (10)..(10): Aminoisobutyric acid
  mod_res (13)..(13): Aminoisobutyric acid
  mod_res (16)..(17): Aminoisobutyric acid
XAXAXXQXVXGLXPVXXQQF

SEQ ID NO: 3032 - protein, 20 aa, Artificial
  Peptide with targeting and/or antimicrobial activity
  mod_res (1)..(1): Aminoisobutyric acid
  mod_res (5)..(6): Aminoisobutyric acid
  misc_feature (8)..(8): Xaa can be any naturally occurring amino acid
  mod_res (10)..(10): Aminoisobutyric acid
  mod_res (13)..(13): Aminoisobutyric acid
  mod_res (16)..(16): Aminoisobutyric acid
  mod_res (17)..(17): Isovaline
XAAAXXQXVXGLXPVXXQQF

SEQ ID NO: 3033 - protein, 20 aa, Artificial
  Peptide with targeting and/or antimicrobial activity
  mod_res (1)..(1): Aminoisobutyric acid
  mod_res (5)..(6): Aminoisobutyric acid
  mod_res (8)..(8): Aminoisobutyric acid
  mod_res (10)..(10): Aminoisobutyric acid
  mod_res (13)..(13): Aminoisobutyric acid
  mod_res (16)..(17): Aminoisobutyric acid
XAAAXXQXIXGLXPVXXQQF

SEQ ID NO: 3034 - protein, 20 aa, Artificial
  Peptide with targeting and/or antimicrobial activity
  mod_res (1)..(1): Aminoisobutyric acid
  mod_res (3)..(3): Aminoisobutyric acid
  mod_res (5)..(6): Aminoisobutyric acid
  misc_feature (8)..(8): Xaa can be any naturally occurring amino acid
  mod_res (10)..(10): Aminoisobutyric acid
  mod_res (13)..(13): Aminoisobutyric acid
  mod_res (16)..(17): Aminoisobutyric acid
XAXAXXQXIXGLXPVXXQQF

SEQ ID NO: 3035 - protein, 20 aa, Artificial
  Peptide with targeting and/or antimicrobial activity
  mod_res (1)..(1): Aminoisobutyric acid
  mod_res (5)..(6): Aminoisobutyric acid
  mod_res (8)..(8): Aminoisobutyric acid
  mod_res (10)..(10): Aminoisobutyric acid
  mod_res (13)..(13): Aminoisobutyric acid
  mod_res (16)..(16): Aminoisobutyric acid
  mod_res (17)..(17): Isovaline
XAAAXXQXIXGLXPVXXQQF

SEQ ID NO: 3036 - protein, 18 aa, Artificial
  Peptide with targeting and/or antimicrobial activity
  mod_res (1)..(1): Aminoisobutyric acid
  mod_res (3)..(3): Aminoisobutyric acid
  mod_res (5)..(5): Aminoisobutyric acid
  mod_res (7)..(9): Aminoisobutyric acid
  mod_res (11)..(12): Aminoisobutyric acid
  mod_res (15)..(15): Aminoisobutyric acid
  mod_res (16)..(16): Isovaline
XGXLXEXXXAXXPLXXQV

SEQ ID NO: 3037 - protein, 18 aa, Artificial
  Peptide with targeting and/or antimicrobial activity
  mod_res (1)..(1): Aminoisobutyric acid
  mod_res (3)..(3): Aminoisobutyric acid
  mod_res (5)..(5): Aminoisobutyric acid
  mod_res (7)..(8): Aminoisobutyric acid
  mod_res (11)..(12): Aminoisobutyric acid
  mod_res (15)..(16): Aminoisobutyric acid
XGXLXQXXAAXXPLXXEV

SEQ ID NO: 3038 - protein, 18 aa, Artificial
  Peptide with targeting and/or antimicrobial activity
  mod_res (1)..(1): Aminoisobutyric acid
  mod_res (3)..(3): Aminoisobutyric acid
  mod_res (5)..(5): Aminoisobutyric acid
  mod_res (7)..(9): Aminoisobutyric acid
  mod_res (12)..(12): Aminoisobutyric acid
  mod_res (15)..(16): Aminoisobutyric acid
XGXLXQXXXAAXPLXXEV

SEQ ID NO: 3039 - protein, 18 aa, Artificial
  Peptide with targeting and/or antimicrobial activity
  mod_res (1)..(1): Aminoisobutyric acid
  mod_res (3)..(3): Aminoisobutyric acid
  mod_res (5)..(5): Aminoisobutyric acid
  mod_res (7)..(8): Aminoisobutyric acid
  mod_res (11)..(12): Aminoisobutyric acid
  mod_res (15)..(15): Aminoisobutyric acid
  mod_res (16)..(16): Isovaline
XGXLXQXXAAXXPLXXEV

SEQ ID NO: 3040 - protein, 18 aa, Artificial
  Peptide with targeting and/or antimicrobial activity
  mod_res (1)..(1): Aminoisobutyric acid
  mod_res (3)..(3): Aminoisobutyric acid
  mod_res (5)..(5): Aminoisobutyric acid
  mod_res (7)..(9): Aminoisobutyric acid
  mod_res (11)..(12): Aminoisobutyric acid
  mod_res (15)..(16): Aminoisobutyric acid
XGXLXQXXXAXXPLXXEV

SEQ ID NO: 3041 - protein, 18 aa, Artificial
  Peptide with targeting and/or antimicrobial activity
  mod_res (1)..(1): Aminoisobutyric acid
  mod_res (3)..(3): Aminoisobutyric acid
  mod_res (5)..(5): Aminoisobutyric acid
  mod_res (7)..(9): Aminoisobutyric acid
  mod_res (11)..(12): Aminoisobutyric acid
  mod_res (15)..(15): Aminoisobutyric acid
  mod_res (16)..(16): Isovaline
XGXLXQXXXAXXPLXXEV

SEQ ID NO: 3042 - protein, 18 aa, Artificial
  Peptide with targeting and/or antimicrobial activity
  mod_res (1)..(1): Aminoisobutyric acid
  mod_res (3)..(3): Aminoisobutyric acid
  mod_res (5)..(5): Aminoisobutyric acid
  mod_res (7)..(9): Aminoisobutyric acid
  mod_res (11)..(12): Aminoisobutyric acid
  mod_res (15)..(16): Aminoisobutyric acid
XAXLXQXXXAXXPLXXEV

SEQ ID NO: 3043 - protein, 18 aa, Artificial
  Peptide with targeting and/or antimicrobial activity
  mod_res (1)..(1): Aminoisobutyric acid
  mod_res (3)..(3): Aminoisobutyric acid
  mod_res (5)..(5): Aminoisobutyric acid
  mod_res (7)..(9): Aminoisobutyric acid
  mod_res (12)..(12): Aminoisobutyric acid
  mod_res (15)..(16): Aminoisobutyric acid
XGXLXQXXXAAXPLXXQV

SEQ ID NO: 3044 - protein, 18 aa, Artificial
  Peptide with targeting and/or antimicrobial activity
  mod_res (1)..(1): Aminoisobutyric acid
  mod_res (3)..(3): Aminoisobutyric acid
  mod_res (5)..(5): Aminoisobutyric acid
  mod_res (7)..(8): Aminoisobutyric acid
  mod_res (11)..(11): Aminoisobutyric acid
  misc_feature (12)..(12): Xaa can be any naturally occurring amino acid
  mod_res (15)..(15): Aminoisobutyric acid
  mod_res (16)..(16): Isovaline
XGXLXQXXAAAXPLXXQV

SEQ ID NO: 3045 - protein, 18 aa, Artificial
  Peptide with targeting and/or antimicrobial activity
  mod_res (1)..(1): Aminoisobutyric acid
  mod_res (3)..(3): Aminoisobutyric acid
  mod_res (5)..(5): Aminoisobutyric acid
  mod_res (7)..(9): Aminoisobutyric acid
  mod_res (12)..(12): Aminoisobutyric acid
  mod_res (15)..(15): Aminoisobutyric acid
  mod_res (16)..(16): Isovaline
XGXLXQXXXAAXPLXXQV

SEQ ID NO: 3046 - protein, 18 aa, Artificial
  Peptide with targeting and/or antimicrobial activity
  mod_res (1)..(1): Aminoisobutyric acid
  mod_res (3)..(3): Aminoisobutyric acid
  mod_res (5)..(5): Aminoisobutyric acid
  mod_res (7)..(9): Aminoisobutyric acid
  mod_res (12)..(12): Aminoisobutyric acid
  mod_res (15)..(15): Aminoisobutyric acid
  mod_res (16)..(16): Isovaline
XAXLXQXXXAAXPLXXQV

SEQ ID NO: 3047 - protein, 18 aa, Artificial
  Peptide with targeting and/or antimicrobial activity
  mod_res (1)..(1): Aminoisobutyric acid
  mod_res (3)..(3): Aminoisobutyric acid
  mod_res (5)..(5): Aminoisobutyric acid
  mod_res (7)..(9): Aminoisobutyric acid
  mod_res (11)..(12): Aminoisobutyric acid
  mod_res (15)..(15): Aminoisobutyric acid
  mod_res (16)..(16): Isovaline
XGXLXQXXXAXXPLXXQV

SEQ ID NO: 3048 - protein, 18 aa, Artificial
  Peptide with targeting and/or antimicrobial activity
  mod_res (1)..(1): Aminoisobutyric acid
  mod_res (3)..(3): Aminoisobutyric acid
  mod_res (5)..(5): Aminoisobutyric acid
  mod_res (7)..(9): Aminoisobutyric acid
  mod_res (11)..(12): Aminoisobutyric acid
  mod_res (15)..(15): Aminoisobutyric acid
  mod_res (16)..(16): Isovaline
XAXLXQXXXAXXPLXXQV

SEQ ID NO: 3049 - protein, 18 aa, Artificial
  Peptide with targeting and/or antimicrobial activity
  mod_res (1)..(1): Aminoisobutyric acid
  misc_feature (7)..(7): Xaa can be any naturally occurring amino acid
  mod_res (9)..(9): Aminoisobutyric acid
  mod_res (11)..(12): Aminoisobutyric acid
  mod_res (15)..(16): Aminoisobutyric acid
XGALAQXVXGXXPLXXQL

SEQ ID NO: 3050 - protein, 18 aa, Artificial
  Peptide with targeting and/or antimicrobial activity
  mod_res (1)..(1): Aminoisobutyric acid
  mod_res (5)..(5): Aminoisobutyric acid
  mod_res (9)..(9): Aminoisobutyric acid
  mod_res (11)..(11): Isovaline
  mod_res (12)..(12): Aminoisobutyric acid
  mod_res (15)..(16): Aminoisobutyric acid
XGALXQAVXGXXPLXXQL

SEQ ID NO: 3051 - protein, 18 aa, Artificial
  Peptide with targeting and/or antimicrobial activity
  mod_res (1)..(1): Aminoisobutyric acid
  mod_res (7)..(7): Aminoisobutyric acid
  mod_res (9)..(9): Aminoisobutyric acid
  mod_res (11)..(11): Isovaline
  mod_res (12)..(12): Aminoisobutyric acid
  mod_res (15)..(16): Aminoisobutyric acid
XGALAQXVXGXXPLXXQL

SEQ ID NO: 3052 - protein, 18 aa, Artificial
  Peptide with targeting and/or antimicrobial activity
  mod_res (1)..(1): Aminoisobutyric acid
  mod_res (5)..(5): Aminoisobutyric acid
  mod_res (7)..(7): Aminoisobutyric acid
  mod_res (9)..(9): Aminoisobutyric acid
  mod_res (11)..(12): Aminoisobutyric acid
  mod_res (15)..(16): Aminoisobutyric acid
XGALXQXVXGXXPLXXQL

SEQ ID NO: 3053 - protein, 18 aa, Artificial
  Peptide with targeting and/or antimicrobial activity
  mod_res (1)..(1): Aminoisobutyric acid
  mod_res (5)..(5): Aminoisobutyric acid
  misc_feature (7)..(7): Xaa can be any naturally occurring amino acid
  mod_res (9)..(9): Aminoisobutyric acid
  mod_res (11)..(12): Aminoisobutyric acid
  mod_res (15)..(16): Aminoisobutyric acid
XGALXQXVXGXXPLXXQL

SEQ ID NO: 3054 - protein, 18 aa, Artificial
  Peptide with targeting and/or antimicrobial activity
  mod_res (1)..(1): Aminoisobutyric acid
  mod_res (5)..(5): Aminoisobutyric acid
  mod_res (7)..(7): Isovaline
  mod_res (9)..(9): Aminoisobutyric acid
  mod_res (11)..(12): Aminoisobutyric acid
  mod_res (15)..(16): Aminoisobutyric acid
XGALXQXVXGXXPLXXQL

SEQ ID NO: 3055 - protein, 18 aa, Artificial
  Peptide with targeting and/or antimicrobial activity
  misc_feature (1)..(1): Xaa can be any naturally occurring amino acid
  misc_feature (5)..(5): Xaa can be any naturally occurring amino acid
  misc_feature (7)..(9): Xaa can be any naturally occurring amino acid
  misc_feature (11)..(12): Xaa can be any naturally occurring amino acid
  misc_feature (15)..(16): Xaa can be any naturally occurring amino acid
XGALXQXXXGXXPLXXQL

SEQ ID NO: 3056 - protein, 18 aa, Artificial
  Peptide with targeting and/or antimicrobial activity
  mod_res (1)..(1): Aminoisobutyric acid
  mod_res (5)..(5): Isovaline
  mod_res (7)..(7): Isovaline
  mod_res (9)..(9): Aminoisobutyric acid
  mod_res (11)..(12): Aminoisobutyric acid
  mod_res (15)..(16): Aminoisobutyric acid
XGALXQXVXGXXPLXXQL

SEQ ID NO: 3057 - protein, 18 aa, Artificial
  Peptide with targeting and/or antimicrobial activity
  mod_res (1)..(1): Aminoisobutyric acid
  mod_res (5)..(5): Aminoisobutyric acid
  mod_res (7)..(7): Aminoisobutyric acid
  mod_res (9)..(9): Aminoisobutyric acid
  mod_res (11)..(11): Isovaline
  mod_res (12)..(12): Aminoisobutyric acid
  mod_res (15)..(16): Aminoisobutyric acid
XGALXQXVXGXXPLXXQL

SEQ ID NO: 3058 - protein, 18 aa, Artificial
  Peptide with targeting and/or antimicrobial activity
  mod_res (1)..(1): Aminoisobutyric acid
  mod_res (5)..(5): Aminoisobutyric acid
  mod_res (7)..(7): Isovaline
  mod_res (9)..(9): Aminoisobutyric acid
  mod_res (11)..(11): Isovaline
  mod_res (12)..(12): Aminoisobutyric acid
  mod_res (15)..(16): Aminoisobutyric acid
XGALXQXVXGXXPLXXQL

SEQ ID NO: 3059 - protein, 18 aa, Artificial
  Peptide with targeting and/or antimicrobial activity
  mod_res (1)..(1): Aminoisobutyric acid
  mod_res (5)..(5): Aminoisobutyric acid
  mod_res (7)..(7): Isovaline
  mod_res (9)..(9): Aminoisobutyric acid
  mod_res (11)..(11): Isovaline
  misc_feature (12)..(12): Xaa can be any naturally occurring amino acid
  mod_res (15)..(16): Aminoisobutyric acid
XGALXQXLXGXXPLXXQL

SEQ ID NO: 3060 - protein, 18 aa, Artificial
  Peptide with targeting and/or antimicrobial activity
  mod_res (1)..(1): Aminoisobutyric acid
  mod_res (5)..(5): Isovaline
  mod_res (7)..(7): Isovaline
  mod_res (9)..(9): Aminoisobutyric acid
  mod_res (11)..(11): Isovaline
  mod_res (12)..(12): Aminoisobutyric acid
  mod_res (15)..(16): Aminoisobutyric acid
XGALXQXVXGXXPLXXQL

SEQ ID NO: 3061 - protein, 19 aa, Artificial
  Peptide with targeting and/or antimicrobial activity
  mod_res (1)..(1): Aminoisobutyric acid
  mod_res (4)..(4): Aminoisobutyric acid
  mod_res (7)..(9): Aminoisobutyric acid
  mod_res (12)..(12): Aminoisobutyric acid
  mod_res (15)..(15): Aminoisobutyric acid
XGAXIQXXXSLXPVXIQQL

SEQ ID NO: 3062 - protein, 11 aa, Artificial
  Peptide with targeting and/or antimicrobial activity
  mod_res (1)..(1): Aminoisobutyric acid
  mod_res (4)..(4): Aminoisobutyric acid
  mod_res (7)..(7): Aminoisobutyric acid
  misc_feature (8)..(8): Xaa can be any naturally occurring amino acid
XGVXGGVXGIL

SEQ ID NO: 3063 - protein, 11 aa, Artificial
  Peptide with targeting and/or antimicrobial activity
  mod_res (1)..(1): Isovaline
  mod_res (4)..(4): Aminoisobutyric acid
  mod_res (7)..(7): Aminoisobutyric acid
  misc_feature (8)..(8): Xaa can be any naturally occurring amino acid
XGVXGGVXGIL

SEQ ID NO: 3064 - protein, 15 aa, Artificial
  Peptide with targeting and/or antimicrobial activity
  mod_res (3)..(3): Aminoisobutyric acid
  mod_res (4)..(4): Isovaline
  mod_res (8)..(8): Aminoisobutyric acid
  mod_res (10)..(10): Aminoisobutyric acid
  mod_res (13)..(13): Aminoisobutyric acid
WVXXAQAXSXALXQL

SEQ ID NO: 3065 - protein, 15 aa, Artificial
  Peptide with targeting and/or antimicrobial activity
  mod_res (3)..(4): Aminoisobutyric acid
  mod_res (8)..(8): Aminoisobutyric acid
  mod_res (10)..(10): Aminoisobutyric acid
  mod_res (13)..(13): Aminoisobutyric acid
WVXXAQAXSXALXQL

SEQ ID NO: 3066 - protein, 17 aa, Artificial
  Peptide with targeting and/or antimicrobial activity
  mod_res (2)..(2): Isovaline
  mod_res (4)..(4): Aminoisobutyric acid
  mod_res (7)..(7): Aminoisobutyric acid
  mod_res (9)..(9): Aminoisobutyric acid
  mod_res (12)..(12): Aminoisobutyric acid
  mod_res (13)..(13): Hydroxyproline
  mod_res (14)..(14): Isovaline
WXQXITXLXPQXXXPFG

SEQ ID NO: 3067 - protein, 17 aa, Artificial
  Peptide with targeting and/or antimicrobial activity
  mod_res (4)..(4): Aminoisobutyric acid
  mod_res (7)..(7): Aminoisobutyric acid
  mod_res (9)..(9): Aminoisobutyric acid
  mod_res (12)..(12): Aminoisobutyric acid
  mod_res (14)..(14): Aminoisobutyric acid
  mod_res (17)..(17): Hydroxyproline
WIAXIVXLXPAXPXPFX

SEQ ID NO: 3068 - protein, 16 aa, Artificial
  Peptide with targeting and/or antimicrobial activity
  mod_res (4)..(4): Isovaline
  mod_res (7)..(7): Aminoisobutyric acid
  mod_res (9)..(9): Aminoisobutyric acid
  mod_res (10)..(10): Hydroxyproline
  mod_res (12)..(12): Aminoisobutyric acid
  mod_res (13)..(13): Hydroxyproline
  mod_res (14)..(14): Aminoisobutyric acid
WIEXVTZLZXQZXZPF

SEQ ID NO: 3069 - protein, 16 aa, Artificial
  Peptide with targeting and/or antimicrobial activity
  mod_res (4)..(4): Isovaline
  mod_res (7)..(7): Aminoisobutyric acid
  mod_res (9)..(9): Aminoisobutyric acid
  mod_res (10)..(10): Hydroxyproline
  mod_res (12)..(12): Aminoisobutyric acid
  mod_res (13)..(13): Hydroxyproline
  mod_res (14)..(14): Aminoisobutyric acid
WVEXITXLXXQXXXPF

SEQ ID NO: 3070 - protein, 16 aa, Artificial
  Peptide with targeting and/or antimicrobial activity
  mod_res (4)..(4): Aminoisobutyric acid
  mod_res (7)..(7): Aminoisobutyric acid
  mod_res (9)..(9): Aminoisobutyric acid
  mod_res (10)..(10): Hydroxyproline
  mod_res (12)..(12): Aminoisobutyric acid
  mod_res (13)..(13): Hydroxyproline
  mod_res (14)..(14): Aminoisobutyric acid
WIEXITXLXXQXXXPF

SEQ ID NO: 3071 - protein, 16 aa, Artificial
  Peptide with targeting and/or antimicrobial activity
  mod_res (4)..(4): Isovaline
  mod_res (7)..(7): Aminoisobutyric acid
  mod_res (9)..(9): Aminoisobutyric acid
  mod_res (10)..(10): Hydroxyproline
  mod_res (12)..(12): Aminoisobutyric acid
  mod_res (13)..(13): Hydroxyproline
  mod_res (14)..(14): Aminoisobutyric acid
WIEXITXLXXQXXXPF

SEQ ID NO: 3072 - protein, 16 aa, Artificial
  Peptide with targeting and/or antimicrobial activity
  mod_res (4)..(4): Aminoisobutyric acid
  mod_res (7)..(7): Aminoisobutyric acid
  mod_res (9)..(9): Aminoisobutyric acid
  mod_res (10)..(10): Hydroxyproline
  mod_res (12)..(12): Aminoisobutyric acid
  mod_res (13)..(13): Hydroxyproline
  mod_res (14)..(14): Aminoisobutyric acid
WIQXVTXLXXQXXXPF

SEQ ID NO: 3073 - protein, 16 aa, Artificial
  Peptide with targeting and/or antimicrobial activity
  mod_res (4)..(4): Aminoisobutyric acid
  mod_res (7)..(7): Aminoisobutyric acid
  mod_res (9)..(9): Aminoisobutyric acid
  mod_res (10)..(10): Hydroxyproline
  mod_res (12)..(12): Aminoisobutyric acid
  mod_res (13)..(13): Hydroxyproline
  mod_res (14)..(14): Aminoisobutyric acid
WIQXITXVXXQXXXPF

SEQ ID NO: 3074 - protein, 16 aa, Artificial
  Peptide with targeting and/or antimicrobial activity
  mod_res (4)..(4): Aminoisobutyric acid
  mod_res (7)..(7): Aminoisobutyric acid
  mod_res (9)..(9): Aminoisobutyric acid
  mod_res (10)..(10): Hydroxyproline
  mod_res (12)..(12): Aminoisobutyric acid
  mod_res (13)..(13): Hydroxyproline
  mod_res (14)..(14): Hydroxyproline
WVQXITXLXXQXXXPF

SEQ ID NO: 3075 - protein, 16 aa, Artificial
  Peptide with targeting and/or antimicrobial activity
  mod_res (4)..(4): Isovaline
  mod_res (7)..(7): Aminoisobutyric acid
  mod_res (9)..(9): Aminoisobutyric acid
  mod_res (10)..(10): Hydroxyproline
  mod_res (12)..(12): Aminoisobutyric acid
  mod_res (13)..(13): Hydroxyproline
  mod_res (14)..(14): Aminoisobutyric acid
WIQXVTXLXXQXXXPF

SEQ ID NO: 3076 - protein, 16 aa, Artificial
  Peptide with targeting and/or antimicrobial activity
  mod_res (4)..(4): Isovaline
  mod_res (7)..(7): Aminoisobutyric acid
  mod_res (9)..(9): Aminoisobutyric acid
  mod_res (10)..(10): Hydroxyproline
  mod_res (12)..(12): Aminoisobutyric acid
  mod_res (13)..(13): Hydroxyproline
  mod_res (14)..(14): Aminoisobutyric acid
WIQXITXVXXQXXXPF

SEQ ID NO: 3077 - protein, 16 aa, Artificial
  Peptide with targeting and/or antimicrobial activity
  mod_res (4)..(4): Aminoisobutyric acid
  mod_res (7)..(7): Aminoisobutyric acid
  mod_res (9)..(9): Aminoisobutyric acid
  mod_res (10)..(10): Hydroxyproline
  mod_res (12)..(12): Aminoisobutyric acid
  mod_res (13)..(13): Hydroxyproline
  mod_res (14)..(14): Aminoisobutyric acid
WIQXITXLXXQXXXPF

SEQ ID NO: 3078 - protein, 16 aa, Artificial
  Peptide with targeting and/or antimicrobial activity
  mod_res (4)..(4): Isovaline
  mod_res (7)..(7): Aminoisobutyric acid
  mod_res (9)..(9): Aminoisobutyric acid
  mod_res (10)..(10): Hydroxyproline
  mod_res (12)..(12): Aminoisobutyric acid
  mod_res (13)..(13): Hydroxyproline
  mod_res (14)..(14): Aminoisobutyric acid
WIQXITXLXXQXXXPF

SEQ ID NO: 3079 - protein, 15 aa, Artificial
  Peptide with targeting and/or antimicrobial activity
GWRLIKKILRVFKGL

SEQ ID NO: 3080 - protein, 16 aa, Artificial
  Peptide with targeting and/or antimicrobial activity
KNLRIIRKGIHIIKKY

SEQ ID NO: 3081 - protein, 11 aa, Artificial
  Peptide with targeting and/or antimicrobial activity
FKKFWKWFRRF

SEQ ID NO: 3082 - protein, 11 aa, Artificial
  Peptide with targeting and/or antimicrobial activity
LKRFLKWFKRF

SEQ ID NO: 3083 - protein, 11 aa, Artificial
  Peptide with targeting and/or antimicrobial activity
KLFKRWKHLFR

SEQ ID NO: 3084 - protein, 11 aa, Artificial
  Peptide with targeting and/or antimicrobial activity
RLLKRFKHLFK

SEQ ID NO: 3085 - protein, 11 aa, Artificial
  Peptide with targeting and/or antimicrobial activity
FKTFLKWLHRF

SEQ ID NO: 3086 - protein, 11 aa, Artificial
  Peptide with targeting and/or antimicrobial activity
IKQLLHFFQRF

SEQ ID NO: 3087 - protein, 11 aa, Artificial
  Peptide with targeting and/or antimicrobial activity
KLLQTFKQIFR

SEQ ID NO: 3088 - protein, 11 aa, Artificial
  Peptide with targeting and/or antimicrobial activity
RILKELKNLFK

SEQ ID NO: 3089 - protein, 11 aa, Artificial
  Peptide with targeting and/or antimicrobial activity
LKQFVHFIHRF

SEQ ID NO: 3090 - protein, 11 aa, Artificial
  Peptide with targeting and/or antimicrobial activity
VKTLLHIFQRF

SEQ ID NO: 3091 - protein, 11 aa, Artificial
  Peptide with targeting and/or antimicrobial activity
KLVEQLKEIFR

SEQ ID NO: 3092 - protein, 11 aa, Artificial
  Peptide with targeting and/or antimicrobial activity
RVLQEIKQILK

SEQ ID NO: 3093 - protein, 11 aa, Artificial
  Peptide with targeting and/or antimicrobial activity
VKNLAELVHRF

SEQ ID NO: 3094 - protein, 11 aa, Artificial
  Peptide with targeting and/or antimicrobial activity
ATHLLHALQRF

SEQ ID NO: 3095 - protein, 11 aa, Artificial
  Peptide with targeting and/or antimicrobial activity
KLAENVKEILR

SEQ ID NO: 3096 - protein, 11 aa, Artificial
  Peptide with targeting and/or antimicrobial activity
RALHEAKEALK

SEQ ID NO: 3097 - protein, 11 aa, Artificial
  Peptide with targeting and/or antimicrobial activity
FHYFWHWFHRF

SEQ ID NO: 3098 - protein, 11 aa, Artificial
  Peptide with targeting and/or antimicrobial activity
LYHFLHWFQRF

SEQ ID NO: 3099 - protein, 11 aa, Artificial
  Peptide with targeting and/or antimicrobial activity
YLFQTWQHLFR

SEQ ID NO: 3100 - protein, 11 aa, Artificial
  Peptide with targeting and/or antimicrobial activity
YLLTEFQHLFK

SEQ ID NO: 3101 - protein, 11 aa, Artificial
  Peptide with targeting and/or antimicrobial activity
FKTFLQWLHRF

SEQ ID NO: 3102 - protein, 11 aa, Artificial
  Peptide with targeting and/or antimicrobial activity
IKTLLHFFQRF

SEQ ID NO: 3103 - protein, 11 aa, Artificial
  Peptide with targeting and/or antimicrobial activity
KLLQTFNQIFR

SEQ ID NO: 3104 - protein, 11 aa, Artificial
  Peptide with targeting and/or antimicrobial activity
TILQSLKNIFK

SEQ ID NO: 3105 - protein, 11 aa, Artificial
  Peptide with targeting and/or antimicrobial activity
LKQFVKFIHRF

SEQ ID NO: 3106 - protein, 11 aa, Artificial
  Peptide with targeting and/or antimicrobial activity
VKQLLKIFNRF

SEQ ID NO: 3107 - protein, 11 aa, Artificial
  Peptide with targeting and/or antimicrobial activity
KLVQQLKNIFR

SEQ ID NO: 3108 - protein, 11 aa, Artificial
  Peptide with targeting and/or antimicrobial activity
RVLNQVKQILK

SEQ ID NO: 3109 - protein, 11 aa, Artificial
  Peptide with targeting and/or antimicrobial activity
VKKLAKLVRRF

SEQ ID NO: 3110 - protein, 11 aa, Artificial
  Peptide with targeting and/or antimicrobial activity
AKRLLKVLKRF

SEQ ID NO: 3111 - protein, 11 aa, Artificial
  Peptide with targeting and/or antimicrobial activity
KLAQKVKRVLR

SEQ ID NO: 3112 - protein, 11 aa, Artificial
  Peptide with targeting and/or antimicrobial activity
RALKRIKHVLK

SEQ ID NO: 3113 - protein, 7 aa, Artificial
  Peptide with targeting and/or antimicrobial activity
RRRRWWW

SEQ ID NO: 3114 - protein, 7 aa, Artificial
  Peptide with targeting and/or antimicrobial activity
RRWWRRW

SEQ ID NO: 3115 - protein, 7 aa, Artificial
  Peptide with targeting and/or antimicrobial activity
RRRWWWR

SEQ ID NO: 3116 - protein, 7 aa, Artificial
  Peptide with targeting and/or antimicrobial activity
RWRWRWR

SEQ ID NO: 3117 - protein, 7 aa, Artificial
  Peptide with targeting and/or antimicrobial activity
RRRFWWR

SEQ ID NO: 3118 - protein, 7 aa, Artificial
  Peptide with targeting and/or antimicrobial activity
RRWWRRF

SEQ ID NO: 3119 - protein, 7 aa, Artificial
  Peptide with targeting and/or antimicrobial activity
RRRWWWF

SEQ ID NO: 3120 - protein, 7 aa, Artificial
  Peptide with targeting and/or antimicrobial activity
RWRWRWF

SEQ ID NO: 3121 - protein, 7 aa, Artificial
  Peptide with targeting and/or antimicrobial activity
RRRRWWK

SEQ ID NO: 3122 - protein, 7 aa, Artificial
  Peptide with targeting and/or antimicrobial activity
RRWWRRK

SEQ ID NO: 3123 - protein, 7 aa, Artificial
  Peptide with targeting and/or antimicrobial activity
RRRWWWK

SEQ ID NO: 3124 - protein, 7 aa, Artificial
  Peptide with targeting and/or antimicrobial activity
RWRWRWK

SEQ ID NO: 3125 - protein, 7 aa, Artificial
  Peptide with targeting and/or antimicrobial activity
RRRKWWK

SEQ ID NO: 3126 - protein, 7 aa, Artificial
  Peptide with targeting and/or antimicrobial activity
RRWKRRK

SEQ ID NO: 3127 - protein, 7 aa, Artificial
  Peptide with targeting and/or antimicrobial activity
RRRKWWK

SEQ ID NO: 3128 - protein, 7 aa, Artificial
  Peptide with targeting and/or antimicrobial activity
RWRKRWK

SEQ ID NO: 3129 - protein, 14 aa, Artificial
  Peptide with targeting and/or antimicrobial activity
LHLLHQLLHLLHQF

SEQ ID NO: 3130 - protein, 14 aa, Artificial
  Peptide with targeting and/or antimicrobial activity
AQAAHQAAHAAHQF

SEQ ID NO: 3131 - protein, 14 aa, Artificial
  Peptide with targeting and/or antimicrobial activity
KLKKLLKKLKKLLK

SEQ ID NO: 3132 - protein, 14 aa, Artificial
  Peptide with targeting and/or antimicrobial activity
LKLLKKLLKLLKKF

SEQ ID NO: 3133 - protein, 14 aa, Artificial
  Peptide with targeting and/or antimicrobial activity
LQLLKQLLKLLKQF

SEQ ID NO: 3134 - protein, 14 aa, Artificial
  Peptide with targeting and/or antimicrobial activity
AQAAKQAAKAAKQF

SEQ ID NO: 3135 - protein, 14 aa, Artificial
  Peptide with targeting and/or antimicrobial activity
RWRRWWRHFHHFFH

SEQ ID NO: 3136 - protein, 14 aa, Artificial
  Peptide with targeting and/or antimicrobial activity
KLKKLLKRWRRWWR

SEQ ID NO: 3137 - protein, 14 aa, Artificial
  Peptide with targeting and/or antimicrobial activity
RWRRLLKKLHHLLH

SEQ ID NO: 3138 - protein, 14 aa, Artificial
  Peptide with targeting and/or antimicrobial activity
KLKKLLKHLHHLLH

SEQ ID NO: 3139 - protein, 15 aa, Artificial
  Peptide with targeting and/or antimicrobial activity
FVFRHKWVWKHRFLF

SEQ ID NO: 3140 - protein, 15 aa, Artificial
  Peptide with targeting and/or antimicrobial activity
VFIHRHVWVHKHVLF

SEQ ID NO: 3141 - protein, 15 aa, Artificial
  Peptide with targeting and/or antimicrobial activity
WRWRARWRWRLRWRF

SEQ ID NO: 3142 - protein, 15 aa, Artificial
  Peptide with targeting and/or antimicrobial activity
WRIHLRARLHVKFRF

SEQ ID NO: 3143 - protein, 15 aa, Artificial
  Peptide with targeting and/or antimicrobial activity
LRIHARFKVHIRLKF

SEQ ID NO: 3144 - protein, 15 aa, Artificial
  Peptide with targeting and/or antimicrobial activity
FHIKFRVHLKVRFHF

SEQ ID NO: 3145 - protein, 15 aa, Artificial
  Peptide with targeting and/or antimicrobial activity
FHVKIHFRLHVKFHF

SEQ ID NO: 3146 - protein, 15 aa, Artificial
  Peptide with targeting and/or antimicrobial activity
LHIHAHFHVHIHLHF

SEQ ID NO: 3147 - protein, 15 aa, Artificial
  Peptide with targeting and/or antimicrobial activity
FKIHFRLKVHIRFKF

SEQ ID NO: 3148 - protein, 15 aa, Artificial
  Peptide with targeting and/or antimicrobial activity
FKAHIRFKLRVKFHF

SEQ ID NO: 3149 - protein, 15 aa, Artificial
  Peptide with targeting and/or antimicrobial activity
LKAKIKFKVKLKIKF

SEQ ID NO: 3150 - protein, 14 aa, Artificial
  Peptide with targeting and/or antimicrobial activity
WIWKHKFLHRHFLF

SEQ ID NO: 3151 - protein, 14 aa, Artificial
  Peptide with targeting and/or antimicrobial activity
VFLHRHVIKHKLVF

SEQ ID NO: 3152 - protein, 13 aa, Artificial
  Peptide with targeting and/or antimicrobial activity
FLHKHVLRHRIVF

SEQ ID NO: 3153 - protein, 13 aa, Artificial
  Peptide with targeting and/or antimicrobial activity
VFKHKIVHRHILF

SEQ ID NO: 3154 - protein, 13 aa, Artificial
  Peptide with targeting and/or antimicrobial activity
FLFKHLFLHRIFF

SEQ ID NO: 3155 - protein, 12 aa, Artificial
  Peptide with targeting and/or antimicrobial activity
LFKHILIHRVIF

SEQ ID NO: 3156 - protein, 12 aa, Artificial
  Peptide with targeting and/or antimicrobial activity
FLHKHLFKHKLF

SEQ ID NO: 3157 - protein, 12 aa, Artificial
  Peptide with targeting and/or antimicrobial activity
VFRHRFIHRHVF

SEQ ID NO: 3158 - protein, 12 aa, Artificial
  Peptide with targeting and/or antimicrobial activity
FIHKLVHKHVLF

SEQ ID NO: 3159 - protein, 12 aa, Artificial
  Peptide with targeting and/or antimicrobial activity
VLRHLFRHRIVF

SEQ ID NO: 3160 - protein, 12 aa, Artificial
  Peptide with targeting and/or antimicrobial activity
LVHKLILRHLLF

SEQ ID NO: 3161 - protein, 12 aa, Artificial
  Peptide with targeting and/or antimicrobial activity
VFKRVLIHKLIF

SEQ ID NO: 3162 - protein, 12 aa, Artificial
  Peptide with targeting and/or antimicrobial activity
IVRKFLFRHKVF

SEQ ID NO: 3163 - protein, 12 aa, Artificial
  Peptide with targeting and/or antimicrobial activity
VLKHVIAHKRLF

SEQ ID NO: 3164 - protein, 11 aa, Artificial
  Peptide with targeting and/or antimicrobial activity
FIRKFLFKHLF

SEQ ID NO: 3165 - protein, 11 aa, Artificial
  Peptide with targeting and/or antimicrobial activity
VIRHVWVRKLF

SEQ ID NO: 3166 - protein, 13 aa, Artificial
  Peptide with targeting and/or antimicrobial activity
FLFRHRFRHRLVF

SEQ ID NO: 3167 - protein, 13 aa, Artificial
  Peptide with targeting and/or antimicrobial activity
LFLHKHAKHKFLF

SEQ ID NO: 3168 - protein, 11 aa, Artificial
  Peptide with targeting and/or antimicrobial activity
FKHKFKHKFIF

SEQ ID NO: 3169 - protein, 11 aa, Artificial
  Peptide with targeting and/or antimicrobial activity
LRHRLRHRLIF

SEQ ID NO: 3170 - protein, 11 aa, Artificial
  Peptide with targeting and/or antimicrobial activity
LILKFLFKFVF

SEQ ID NO: 3171 - protein, 11 aa, Artificial
  Peptide with targeting and/or antimicrobial activity
VLIRILVRVIF

SEQ ID NO: 3172 - protein, 9 aa, Artificial
  Peptide with targeting and/or antimicrobial activity
FRHRFRHRF

SEQ ID NO: 3173 - protein, 9 aa, Artificial
  Peptide with targeting and/or antimicrobial activity
LKHKLKHKF

SEQ ID NO: 3174 - protein, 9 aa, Artificial
  Peptide with targeting and/or antimicrobial activity
FKFKHKLIF

SEQ ID NO: 3175 - protein, 9 aa, Artificial
  Peptide with targeting and/or antimicrobial activity
LRLRHRVLF

SEQ ID NO: 3176 - protein, 9 aa, Artificial
  Peptide with targeting and/or antimicrobial activity
FKFLFKFLF

SEQ ID NO: 3177 - protein, 9 aa, Artificial
  Peptide with targeting and/or antimicrobial activity
LRLFLRWLF

SEQ ID NO: 3178 - protein, 9 aa, Artificial
  Peptide with targeting and/or antimicrobial activity
FKFLFKHKF

SEQ ID NO: 3179 - protein, 9 aa, Artificial
  Peptide with targeting and/or antimicrobial activity
LRLFLRHRF

SEQ ID NO: 3180 - protein, 7 aa, Artificial
  Peptide with targeting and/or antimicrobial activity
FKFLFKF

SEQ ID NO: 3181 - protein, 7 aa, Artificial
  Peptide with targeting and/or antimicrobial activity
LRLFLRF

SEQ ID NO: 3182 - protein, 14 aa, Artificial
  Peptide with targeting and/or antimicrobial activity
HHFFHHFHHFFHHF

SEQ ID NO: 3183 - protein, 14 aa, Artificial
  Peptide with targeting and/or antimicrobial activity
FHFFHHFFHFFHHF

SEQ ID NO: 3184 - protein, 21 aa, Artificial
  Peptide with targeting and/or antimicrobial activity
KLLKGATFHFFHHFFHFFHHF

SEQ ID NO: 3185 - protein, 18 aa, Artificial
  Peptide with targeting and/or antimicrobial activity
KLLKFHFFHHFFHFFHHF

SEQ ID NO: 3186 - protein, 18 aa, Artificial
  Peptide with targeting and/or antimicrobial activity
FHFFHHFFHFFHHFKLLK

SEQ ID NO: 3187 - protein, 7 aa, Artificial
  Peptide with targeting and/or antimicrobial activity
YSPWTNF

SEQ ID NO: 3188 - protein, 18 aa, Artificial
  Peptide with targeting and/or antimicrobial activity
GSQLVYREWVGHSNVIKP

SEQ ID NO: 3189 - protein, 20 aa, Artificial
  Peptide with targeting and/or antimicrobial activity
GSQLVYREWVGHSNVIKGPP

SEQ ID NO: 3190 - protein, 37 aa, Artificial; identical to SEQ ID NO: 1910
  Peptide with targeting and/or antimicrobial activity

SEQ ID NO: 3191 - protein, 14 aa, Artificial
  Peptide with targeting and/or antimicrobial activity
  misc_feature (14)..(14): Xaa can be any naturally occurring amino acid
FKRIVQRIKDFLRX

SEQ ID NO: 3192 - protein, 15 aa, Artificial
  Peptide with targeting and/or antimicrobial activity
  misc_feature (1)..(1): Xaa can be any naturally occurring amino acid
  misc_feature (15)..(15): Xaa can be any naturally occurring amino acid
XRLFDKIRQVIRKFX

SEQ ID NO: 3193 - protein, 37 aa, Artificial; identical to SEQ ID NO: 1910
  Peptide with targeting and/or antimicrobial activity

SEQ ID NO: 3194 - protein, 38 aa, Artificial
  Peptide with targeting and/or antimicrobial activity
CLLGDFFRKSKEKIGKEFKRIVQRIKDFLRNLVPRTES

SEQ ID NO: 3195 - protein, 16 aa, Artificial
  Peptide with targeting and/or antimicrobial activity
FKRIVQRIKDFLRNLV

SEQ ID NO: 3196 - protein, 39 aa, Artificial
  Peptide with targeting and/or antimicrobial activity
CLLGDFFRKSKEKIGKEFKRIVQRIKDFLRNLVPRTESC

SEQ ID NO: 3197 - protein, 13 aa, Artificial
  Peptide with targeting and/or antimicrobial activity
FKRIVQRIKDFLR

SEQ ID NO: 3198 - protein, 21 aa, Artificial
  Peptide with targeting and/or antimicrobial activity
FKRIVQRIKDFLRNLVPRTES

SEQ ID NO: 3199 - protein, 21 aa, Artificial
  Peptide with targeting and/or antimicrobial activity
GKEFKRIVQRIKDFLRNLVPR

SEQ ID NO: 3200 - protein, 20 aa, Artificial
  Peptide with targeting and/or antimicrobial activity
KRIVQRIKDFLRNLVPRTES

SEQ ID NO: 3201 - protein, 21 aa, Artificial
  Peptide with targeting and/or antimicrobial activity
LLGDFFRKSKEKIGKEFKRIV

SEQ ID NO: 3202 - protein, 31 aa, Artificial; identical to SEQ ID NO: 2450
  Peptide with targeting and/or antimicrobial activity

SEQ ID NO: 3203 - protein, 21 aa, Artificial
  Peptide with targeting and/or antimicrobial activity
SKEKIGKEFKRIVQRIKDFLR

SEQ ID NO: 3204 - protein, 38 aa, Artificial
  Peptide with targeting and/or antimicrobial activity
LLGDFFRKSKEKIGKEFKRIVQRIKDFLRNLVPRTESC

SEQ ID NO: 3205 - protein, 8 aa, Artificial
  Peptide with targeting and/or antimicrobial activity
DYKDDDDK

SEQ ID NO: 3206 - protein, 4 aa, Artificial
  Peptide with targeting and/or antimicrobial activity
HHHH

SEQ ID NO: 3207 - protein, 5 aa, Artificial
  Peptide with targeting and/or antimicrobial activity
HHHHH

SEQ ID NO: 3208 - protein, 6 aa, Artificial
  Peptide with targeting and/or antimicrobial activity
HHHHHH

SEQ ID NO: 3209 - protein, 5 aa, Artificial
  Peptide with targeting and/or antimicrobial activity
PSGSP

SEQ ID NO: 3210 - protein, 5 aa, Artificial
  Peptide with targeting and/or antimicrobial activity
ASASA

SEQ ID NO: 3211 - protein, 15 aa, Artificial
  Peptide with targeting and/or antimicrobial activity
GGGGSGGGGSGGGGS

SEQ ID NO: 3212 - protein, 4 aa, Artificial
  Peptide with targeting and/or antimicrobial activity
GGGG

SEQ ID NO: 3213 - protein, 6 aa, Artificial
  Peptide with targeting and/or antimicrobial activity
GGSGGS

SEQ ID NO: 3214 - protein, 5 aa, Artificial
  Peptide with targeting and/or antimicrobial activity
PSPSP

SEQ ID NO: 3215 - protein, 5 aa, Artificial
  Peptide with targeting and/or antimicrobial activity
ASASA

SEQ ID NO: 3216 - protein, 5 aa, Artificial
  Peptide with targeting and/or antimicrobial activity
PSPSP

SEQ ID NO: 3217 - protein, 4 aa, Artificial
  Peptide with targeting and/or antimicrobial activity
KKKK

SEQ ID NO: 3218 - protein, 4 aa, Artificial
  Peptide with targeting and/or antimicrobial activity
RRRR

SEQ ID NO: 3219 - protein, 5 aa, Artificial
  Peptide with targeting and/or antimicrobial activity
GGGGS

SEQ ID NO: 3220 - protein, 10 aa, Artificial
  Peptide with targeting and/or antimicrobial activity
GGGGSGGGGS

SEQ ID NO: 3221 - protein, 15 aa, Artificial
  Peptide with targeting and/or antimicrobial activity
GGGGSGGGGSGGGGS

SEQ ID NO: 3222 - protein, 20 aa, Artificial
  Peptide with targeting and/or antimicrobial activity
GGGGSGGGGSGGGGSGGGGS

SEQ ID NO: 3223 - protein, 25 aa, Artificial
  Peptide with targeting and/or antimicrobial activity
GGGGSGGGGSGGGGSGGGGSGGGGS

SEQ ID NO: 3224 - protein, 30 aa, Artificial
  Peptide with targeting and/or antimicrobial activity
GGGGSGGGGSGGGGSGGGGSGGGGSGGGGS

SEQ ID NO: 3225 - protein, 29 aa, Artificial
  Peptide with targeting and/or antimicrobial activity
KFINGVLSQFVLERKPYPKLFKFLRKHLL

SEQ ID NO: 3226 - protein, 11 aa, Artificial
  Peptide with targeting and/or antimicrobial activity
FIRKFLKKWLL

SEQ ID NO: 3227 - protein, 11 aa, Artificial
  Peptide with targeting and/or antimicrobial activity
TFFRFLNRGGG

SEQ ID NO: 3228 - protein, 23 aa, Artificial
  Peptide with targeting and/or antimicrobial activity
TFFRFLNRGGGKFIRKFLKKWLL

SEQ ID NO: 3229 - protein, 15 aa, Artificial
  Peptide with targeting and/or antimicrobial activity
KKHRKHRKHRKHGGG

SEQ ID NO: 3230 - protein, 28 aa, Artificial
  Peptide with targeting and/or antimicrobial activity
FIKHFIHRFGGGKNLRIIRKGIHIIKKY

SEQ ID NO: 3231 - protein, 33 aa, Artificial
  Peptide with targeting and/or antimicrobial activity
TFFRLFNRSFTQALGKGGGFLKFLKKFFKKLKY

SEQ ID NO: 3232 - protein, 29 aa, Artificial
  Peptide with targeting and/or antimicrobial activity
KFINGVLSQFVLERKPYPKLFKFLRKHLL

SEQ ID NO: 3233 - protein, 22 aa, Artificial
  Peptide with targeting and/or antimicrobial activity
NIFEYFLEGGGKLFKFLRKHLL

SEQ ID NO: 3234 - protein, 45 aa, Artificial
  Peptide with targeting and/or antimicrobial activity
GKAKPYQVRQVLRAVDKLETRRKKGGRPYPGWRLIKKILRVFKGL

SEQ ID NO: 3235 - protein, 41 aa, Artificial
  Peptide with targeting and/or antimicrobial activity
SKRGRKRKDRRKKKANHGKRPNSGGGGWRLIKKILRVFKGL

SEQ ID NO: 3236 - protein, 23 aa, Artificial
  Peptide with targeting and/or antimicrobial activity
YSKTLHFADGGGKILKFLFKKVF

SEQ ID NO: 3237 - protein, 37 aa, Artificial
  Peptide with targeting and/or antimicrobial activity
SKRGRKRKDRRKKKANHGKRPNSGGGKILKFLFKKVF

SEQ ID NO: 3238 - protein, 46 aa, Artificial
  Peptide with targeting and/or antimicrobial activity
GSVIKKRRKRMSKKKHRKMLRRTRVQRRKLGKGGGKILKFLFKKVF
